(19) United States
(12) Patent Application Publication
(10) Pub. No.: US 2004/0072156 A1
(43) Pub. Date: Apr. 15, 2004

(54) Detection of genetic polymorphisms

(75) Inventors: Yusuke Nakamura, Yokohama-shi (JP); Akihiro Sekine, Tokyo (JP); Aritoshi Ilda, Kawasaki-shi (JP); Susumu Saito, Tokyo (JP)

Correspondence Address: MEDLEN & CARROLL, LLP, 101 Howard Street, Suite 350, San Francisco, CA, 94105, US

(73) Assignee: Riken Institute of Physical and Chemical Research

(21) Appl. No.: 10/035,833

(22) Filed: Dec. 27, 2001

(30) Foreign Application Priority Data
Dec. 27, 2000 (JP) 2000-399,443
May 2, 2001 (JP) 2001-135,256
Aug. 27, 2001 (JP) 2001-256,862
Dec. 26, 2001 (JP) 2001-395196
Dec. 27, 2001 (WO) PCT/JP01/11592

(51) Int. Cl. C12Q 1/68

(52) U.S. Cl. 435/6

(57) ABSTRACT

The present invention relates to genetic polymorphism data, compositions and methods for detecting genetic polymorphisms, methods for evaluating drugs using genetic polymorphisms and screening methods for drugs.

[0001] The present invention claims priority to Japanese Patent Application Ser. Nos. 2000-399,443 filed Dec. 27, 2000, 2001-135,256 filed May 2, 2001, 2001-256,862 filed Aug. 27, 2001, and 2001-(awaiting serial number) filed December 2001, each of which was filed with the Commissioner of the Japanese Patent Office. Right of priority under 35 U.S.C. 119 is claimed from these Japanese patent applications under the Paris Convention for the Protection of Industrial Property. The present invention also claims priority to PCT application (awaiting serial number) filed Dec. 27, 2001 in the Japanese receiving office. Each of these applications are herein incorporated by reference in their entireties.

### FIELD OF THE INVENTION

[0002] The present invention relates to genetic polymorphism data, compositions and methods for detecting genetic polymorphisms, methods for evaluating drugs using genetic polymorphisms and screening methods for drugs.

### BACKGROUND

[0003] Human beings come in all shapes and sizes, and over three billion genetic codes are located in somewhat different sites in each human being. Individual DNA sequence variations in the human genome are known to directly cause specific diseases or conditions, to predispose certain individuals to specific diseases or conditions, and to affect responses of individuals to treatments such as drugs. Such variations also modulate the severity or progression of many diseases. Additionally, DNA sequences vary between populations. Therefore, determining DNA sequence variations in the human genome is useful for making accurate diagnoses, for finding suitable therapies, and for understanding the relationship between genome variations and environmental factors in the pathogenesis of diseases, the prevalence of conditions and the efficacy of therapies. function. Analysis of genetic polymorphisms such as SNPs allows for the selection of drugs and the development of treatment protocols tailored to each individual patient (so-called “personalized” medical treatments). Instead of the using trial-and-error methods of matching patients with the right drugs, doctors may, for example, be able to analyze a patient's genetic profile and prescribe the best available drug therapy from the beginning. Not only would this take the guesswork out of finding the right drug, it would reduce the likelihood of adverse reactions, thus increasing safety.

### SUMMARY OF THE INVENTION

[0004] The present invention identifies genetic polymorphisms relating to genes associated with drug metabolism. In some embodiments, the present invention provides methods for determining variations in sequences and genes associated with drug-metabolizing enzymes. In preferred embodiments, the present invention provides methods for collecting genetic polymorphism data for use in evaluating the effectiveness and safety of a drug based on the data, and screening drugs using the data. In some preferred embodiments, the polymorphisms of the present invention are used to evaluate a causal relationship between the genetic make-up of a patient and a response to an administered drug.

[0005] The present invention relates to genes encoding enzymes associated with drug metabolism (drug metabolizing enzymes, or DMEs). In particular, the present invention relates to sequence variations associated with variations in DMEs. In some embodiments, variations occur in coding regions of DMEs, such as may alter a function of the DMEs, (e.g., by increasing or decreasing its level of activity, or shifting its activity to an alternative target or function). In other embodiments, the variations occur in non-coding regions of the genome, such as may alter expression of a DME (e.g., increasing or decreasing the amount of an enzyme produced in a cell) or processing of an RNA transcript encoding a DME (e.g., by altering splicing).

[0006] In some embodiments, the present invention provides methods for detecting DME-related sequence variations. In some preferred embodiments, the methods of the present invention are used to create a profile of DME-related polymorphisms in a test subject.

[0007] In other embodiments, the present invention provides isolated nucleic acid sequences encoding variant DMEs. For example, the present invention provides a recombinant DNA vector comprising DNA having a nucleotide sequence encoding a variant DME, the nucleotide sequence comprising a sequence including, but not limited to, SEQ ID NOS:1-3360 and 3361-7669, and substantially similar sequences. In a preferred embodiment, the invention provides a host cell transformed with a recombinant DNA vector comprising DNA having a nucleotide sequence encoding a variant DME. The invention is not limited by the nature of the host cell employed. The art is well aware of expression vectors suitable for the expression of nucleotide sequences encoding variant DMEs that can be expressed in a variety of prokaryotic and eukaryotic host cells. In some preferred embodiments, the host cell is a eukaryotic cell grown in culture, such as for use in in vitro drug screening (e.g., by monitoring the expression of genes associated with the pathways targeted by a particular test drug). In other preferred embodiments, the host cell is in vivo.

[0008] The present invention provides systems and methods for detection of polymorphisms associated with genes encoding enzymes associated with drug metabolism. The present invention is not limited in the nature of the detection assay used for detection or identification of such polymorphisms. Such detection assays include, but are not limited to, hybridization methods and array technologies (e.g., technologies available from Aclara BioSciences, Haywood, Calif.; Affymetrix, Santa Clara, Calif.; Agilent Technologies, Inc., Palo Alto, Calif.; Aviva Biosciences Corp., San Diego, Calif.; Caliper Technologies Corp., Palo Alto, Calif.; Celera, Rockville, Md.; CuraGen Corp., New Haven, Conn.; Hyseq Inc., Sunnyvale, Calif.; Illumina, Inc., San Diego, Calif.; Incyte Genomics, Palo Alto, Calif.; Motorola BioChip Systems; Nanogen, San Diego, Calif.; Orchid BioSciences, Inc., Princeton, N.J.; Applera Corp., Foster City, Calif.; Rosetta Inpharmatics, Kirkland, Wash.; and Sequenom, San Diego, Calif.); polymerase chain reaction-based methods (e.g.,TAQMAN, Applera Corp., GENECODE system, EraGen, Middleton, Wis.); branched hybridization methods; enzyme mismatch cleavage methods; NASBA; sandwich hybridization methods; methods employing molecular beacons; ligase chain reactions, and the like.

[0009] Methods of the present invention find application in improving the drug discovery and approval processes. For example, the costs and risks of drug development may be reduced if only those persons capable of responding to a drug are selected for clinical trials. In addition, previously failed drug candidates may be revived as they are matched with more appropriate patient populations. Decreases in the number of adverse drug reactions, the number of failed drug trials, the time it takes to get a drug approved, the length of time patients are on medication, the number of medications patients must take to find an effective therapy, and an increase in the range of possible drug targets will promote a net decrease in the cost of health care.

[0010] Thus, in some embodiments, the present invention provides a method of identifying individuals having a polymorphism, comprising providing nucleic acid from a subject; and detecting the presence of at least one polymorphism in said nucleic acid, said at least one polymorphism including, but not limited to, polymorphisms found in SEQ ID Nos:1-3360 and 3361-7669. In some embodiments, the method further provides the step of providing a prognosis (e.g., a genotype relative risk or a population attributable risk) to the subject based on the presence or absence of the at least one polymorphism. In some embodiments, the detecting step is carried out using a detection assay including, but not limited to, a hybridization assay, a TAQMAN assay, an invasive cleavage assay, use of mass spectroscopy, a microarray, a polymerase chain reaction, a rolling circle extension assay, a sequencing assay, a hybridization assay employing a probe complementary to a polymorphism, a bead array assay, a primer extension assay, an enzyme mismatch cleavage assay, a branched hybridization assay, a NASBA assay, a molecular beacon assay, a cycling probe assay, a ligase chain reaction assay, and a sandwich hybridization assay.

[0011] The present invention also provides a nucleic acid (e.g., a gene, a probe, a primer, etc.) comprising a sequence selected from the group consisting of SEQ ID NO:1-3360 and 3361-7669 or complements thereof. In some embodiments, the nucleic acid molecule comprises a label. In some embodiments, the nucleic acid is attached to a solid support (e.g., as part of a microarray). The present invention also provides vectors comprising the nucleic acid and host cell comprising the vector, as well as polypeptide encoded by the nucleic acid. Methods of producing and purifying polypeptides are well known in the art.

[0012] The present invention further provides kits for detecting a polymorphism, comprising at least one reagent that specifically detects a polymorphism in a sequence including, but not limited to, SEQ ID Nos:1-3360 and 3361-7669. In some embodiments, the kit further comprising instructions for determining whether the subject is at increased risk of having a drug metabolism disorder. In some embodiments, the at least one reagent comprises a nucleic acid probe. The kits can be configured for a variety of uses including, but not limited to, use as an in vitro diagnostic detection assay, an analyte specific reagent detection assay, and a research-use-only detection assay.

[0013] The present invention also provides a method for screening subjects for genetic nmarkers associated with drug metabolizing enzyme(s), comprising: a) providing a biological sample comprising a nucleic acid from a subject; b) testing the nucleic acid for a polymorphism in a genetic marker associated with a drug metabolizing enzyme, said genetic marker comprising one or more nucleotide polymorphisms designated by n, said n selected from a base substitution, an insertion, or a deletion found in a sequence selected from the group consisting of SEQ ID Nos:1-3360 and 3361-7669. The present invention is not limited by the source of the nucleic acid. In some embodiments, the biological sample comprises blood, saliva, amniotic fluid, and tissue. In some embodiments, the subject is a human. In some preferred embodiments, the nucleic acid comprises DNA and/or RNA.

[0014] The present invention further provides a composition comprising an array of detection assays, said array comprising a plurality of drug metabolizing enzyme nucleotide polymorphism detection assays, one or more of said detection assays being capable of detecting one or more nucleotide polymorphisms designated by n in SEQ ID Nos:1-3360 and 3361-7669, wherein n represents a base substitution, insertion, or deletion compared to a wild-type sequence.

[0015] The present invention also provides a composition comprising a detection probe for determining the presense or absence a single nucleotide polymorphism in a gene encoding a drug metabolizing enzyme, said gene comprising a sequence selected from the group consisting of SEQ ID Nos:1-3360 and 3361-7669.

[0016] The present invention further provides a method of determining the effectiveness of or side-effect of a drug or treatment protocol, comprising; a) administering a drug or treatment protocol to one or more subjects; b) obtaining nucleic acid from said one or more subjects; c) using a detection assay to detect the presence of at least one polymorphism in said nucleic acid from said one or more of subjects, said at least one polymorphism selected from the group consisting of polymorphisms found in SEQ ID Nos:1-3360 and 3361-7669; and d) assigning an effectiveness rating, side-effect rating, or score for said drug or treatment protocol based upon a result of one or more said detection assays (See e.g., Toxicology Testing Handbook: Principles, Applications, and Data Interpretation, ed. Jacobson-Kram and Keller, 2001, herein incorporated by reference in its entirety).

[0017] The present invention also provides a method of prescribing a drug to or treatment protocol for a subject, comprising; providing nucleic acid from said subject; using a detection assay to detect the presence of at least one polymorphism in the nucleic acid, said at least one polymorphism selected from the group consisting of polymorphisms found in SEQ ID Nos:1-3360 and 3361-7669; and, prescribing said drug or treatment protocol based upon the result of said detection assay.

[0018] The present invention further provides a method for generating assay data comprising: obtaining a sample from a subject containing nucleic acid; transferring said sample to a laboratory; and receiving data from said laboratory, wherein said data corresponds to the presence of at least one polymorphism in said nucleic acid, said at least one polymorphism selected from the group consisting of polymorphisms found in SEQ ID Nos:1-3360 and 3361-7669. The present further provides data sets generated by this method.

### DEFINITIONS

[0019] To facilitate an understanding of the present invention, a number of terms and phrases are defined below:

[0020] As used herein, the terms “complementary” or “complementarity” are used in reference to polynucleotides (i.e., a sequence of nucleotides such as an oligonucleotide or a target nucleic acid) related by the base-pairing rules. For example, for the sequence “5′-A-G-T-3′,” is complementary to the sequence “3′-T-C-A-5′.” Complementarity may be “partial,” in which only some of the nucleic acids' bases are matched according to the base pairing rules. Or, there may be “complete” or “total” complementarity between the nucleic acids. The degree of complementarity between nucleic acid strands has significant effects on the efficiency and strength of hybridization between nucleic acid strands. This is of particular importance in amplification reactions, as well as detection methods that depend upon binding between nucleic acids. Either term may also be used in reference to individual nucleotides, especially within the context of polynucleotides. For example, a particular nucleotide within an oligonucleotide may be noted for its complementarity, or lack thereof, to a nucleotide within another nucleic acid strand, in contrast or comparison to the complementarity between the rest of the oligonucleotide and the nucleic acid strand. Nucleotide analogs used to form non-standard base pairs, whether with another nucleotide analog (e.g., an IsoC/IsoG base pair), or with a naturally occurring nucleotide (e.g., as described in U.S. Pat. No. 5,912,340, herein incorporated by reference in its entirety) are also considered to be complementary to a base pairing partner within the meaning this definition.

[0021] The term “homology” and “homologous” refers to a degree of identity. There may be partial homology or complete homology. A partially homologous sequence is one that is less than 100% identical to another sequence.

[0022] As used herein, the term “hybridization” is used in reference to the pairing of complementary nucleic acids. Hybridization and the strength of hybridization (i.e., the strength of the association between the nucleic acids) is influenced by such factors as the degree of complementary between the nucleic acids, stringency of the conditions involved, and the Tₘ of the formed hybrid. “Hybridization” methods involve the annealing of one nucleic acid to another, complementary nucleic acid, i.e., a nucleic acid having a complementary nucleotide sequence. The ability of two polymers of nucleic acid containing complementary sequences to Find each other and anneal through base pairing interaction is a well-recognized phenomenon. The initial observations of the “hybridization” process by Marmur and Lane, Proc. Natl. Acad. Sci. USA 46:453 (1960) and Doty et al., Proc. Natl. Acad. Sci. USA 46:461 (1960) have been followed by the refinement of this process into an essential tool of modem biology.

[0023] With regard to complementarity, it is important for some diagnostic applications to determine whether the hybridization represents complete or partial complementarity. For example, where it is desired to detect simply the presence or absence of a foreign DNA sequence, it is only important that the hybridization method ensures hybridization when the relevant sequence is present; conditions can be selected where both partially complementary probes and completely complementary probes will hybridize. Other diagnostic applications, however, may require that the hybridization method distinguish between partial and complete complementarity. It may be of interest to detect genetic polymorphisms. For example, human hemoglobin is composed, in part, of four polypeptide chains. Two of these chains are identical chains of 141 amino acids (alpha chains) and two of these chains are identical chains of 146 amino acids (beta chains). The gene encoding the beta chain is known to exhibit polymorphism. The normal allele encodes a beta chain having glutamic acid at the sixth position. The mutant allele encodes a beta chain having valine at the sixth position. This difference in amino acids has a profound (most profound when the individual is homozygous for the mutant allele) physiological impact known clinically as sickle cell anemia. It is well known that the genetic basis of the amino acid change involves a single base difference between the normal allele DNA sequence and the mutant allele DNA sequence.

[0024] The complement of a nucleic acid sequence as used herein refers to an oligonucleotide which, when aligned with the nucleic acid sequence such that the 5′ end of one sequence is paired with the 3′ end of the other, is in “antiparallel association.” Certain bases not commonly found in natural nucleic acids may be included in the nucleic acids of the present invention and include, for example, inosine and 7-deazaguanine. Complementarity need not be perfect; stable duplexes may contain mismatched base pairs or unmatched bases. Those skilled in the art of nucleic acid technology can determine duplex stability empirically considering a number of variables including, for example, the length of the oligonucleotide, base composition and sequence of the oligonucleotide, ionic strength and incidence of mismatched base pairs.

[0025] As used herein, the term “Tₘ” is used in reference to the “melting temperature.” The melting temperature is the temperature at which a population of double-stranded nucleic acid molecules becomes half dissociated into single strands. Several equations for calculating the Tₘ of nucleic acids are well known in the art. As indicated by standard references, a simple estimate of the Tₘ value may be calculated by the equation: Tₘ=81.5+0.41 (% G+C), when a nucleic acid is in aqueous solution at 1 M NaCl (see e.g., Anderson and Young, Quantitative Filter Hybridization, in Nucleic Acid Hybridization (1985). Other references (e.g., Allawi, H. T. & SantaLucia, J., Jr. Thermodynamics and NMR of internal G.T mismatches in DNA. Biochemistry 36, 10581-94 (1997) include more sophisticated computations which take structural and environmental, as well as sequence characteristics into account for the calculation of Tₘ.

[0026] As used herein the term “stringency” is used in reference to the conditions of temperature, ionic strength, and the presence of other compounds, under which nucleic acid hybridizations are conducted. With “high stringency” conditions, nucleic acid base pairing will occur only between nucleic acid fragments that have a high frequency of complementary base sequences. Thus, conditions of “weak” or “low” stringency are often required when it is desired that nucleic acids that are not completely complementary to one another be hybridized or annealed together.

[0027] “High stringency conditions” when used in reference to nucleic acid hybridization comprise conditions equivalent to binding or hybridization at 42 C in a solution consisting of 5× SSPE (43.8 g/l NaCl, 6.9 g/l NaH₂PO₄ H₂O and 1.85 g/l EDTA, pH adjusted to 7.4 with NaOH), 0.5% SDS, 5× Denhardt's reagent and 100 μg/ml denatured salmon sperm DNA followed by washing in a solution comprising 0.1× SSPE, 1.0% SDS at 42 C when a probe of about 500 nucleotides in length is employed.

[0028] “Medium stringency conditions” when used in reference to nucleic acid hybridization comprise conditions equivalent to binding or hybridization at 42 C in a solution consisting of 5× SSPE (43.8 g/l NaCl, 6.9 g/l NaH₂PO₄ H₂O and 1.85 g/l EDTA, pH adjusted to 7.4 with NaOH), 0.5% SDS, 5× Denhardt's reagent and 100 μg/ml denatured salmon sperm DNA followed by washing in a solution comprising 1.0× SSPE, 1.0% SDS at 42 C when a probe of about 500 nucleotides in length is employed.

[0029] “Low stringency conditions” comprise conditions equivalent to binding or hybridization at 42 C in a solution consisting of 5× SSPE (43.8 g/l NaCl, 6.9 g/l NaH₂PO₄H₂O and 1.85 g/l EDTA, pH adjusted to 7.4 with NaOH), 0.1% SDS, 5× Denhardt's reagent [50× Denhardt's contains per 500 ml: 5 g Ficoll (Type 400, Pharamcia), 5 g BSA (Fraction V; Sigma)] and 100 g/ml denatured salmon sperm DNA followed by washing in a solution comprising 5× SSPE, 0.1% SDS at 42 C when a probe of about 500 nucleotides in length is employed.

[0030] The term “gene” refers to a DNA sequence that comprises control and coding sequences necessary for the production of an RNA having a non-coding function (e.g., a ribosomal or transfer RNA), a polypeptide or a precursor. The RNA or polypeptide can be encoded by a full-length coding sequence or by any portion of the coding sequence so long as the desired activity or function is retained.

[0031] The term “wild-type” refers to a gene or a gene product that has the characteristics of that gene or gene product when isolated from a naturally occurring source. A wild-type gene is that which is most frequently observed in a population and is thus arbitrarily designated the “normal” or “wild-type” form of the gene. In contrast, the term “modified,” “mutant,” or “polymorphic” refers to a gene or gene product that displays modifications in sequence and or functional properties (i.e., altered characteristics) when compared to the wild-type gene or gene product. It is noted that naturally-occurring mutants can be isolated; these are identified by the fact that they have altered characteristics when compared to the wild-type gene or gene product.

[0032] The term “oligonucleotide” as used herein is defined as a molecule comprising two or more deoxyribonucleotides or ribonucleotides, preferably at least 5 nucleotides, more preferably at least about 10-15 nucleotides and more preferably at least about 15 to 30 nucleotides. The exact size will depend on many factors, which in turn depend on the ultimate function or use of the oligonucleotide. The oligonucleotide may be generated in any manner, including chemical synthesis, DNA replication, reverse transcription, PCR, or a combination thereof.

[0033] Because mononucleotides are reacted to make oligonucleotides in a manner such that the 5′ phosphate of one mononucleotide pentose ring is attached to the 3′ oxygen of its neighbor in one direction via a phosphodiester linkage, an end of an oligonucleotide is referred to as the “5′ end” if its 5′ phosphate is not linked to the 3′ oxygen of a mononucleotide pentose ring and as the “3′ end” if its 3′ oxygen is not linked to a 5′ phosphate of a subsequent mononucleotide pentose ring. As used herein, a nucleic acid sequence, even if internal to a larger oligonucleotide, also may be said to have 5′ and 3′ ends. A first region along a nucleic acid strand is said to be upstream of another region if the 3′ end of the first region is before the 5′ end of the second region when moving along a strand of nucleic acid in a 5′ to 3′ direction.

[0034] When two different, non-overlapping oligonucleotides anneal to different regions of the same linear complementary nucleic acid sequence, and the 3′ end of one oligonucleotide points towards the 5′ end of the other, the former may be called the “upstream” oligonucleotide and the latter the “downstream” oligonucleotide. Similarly, when two overlapping oligonucleotides are hybridized to the same linear complementary nucleic acid sequence, with the first oligonucleotide positioned such that its 5′ end is upstream of the 5′ end of the second oligonucleotide, and the 3′ end of the first oligonucleotide is upstream of the 3′ end of the second oligonucleotide, the first oligonucleotide may be called the “upstream” oligonucleotide and the second oligonucleotide may be called the “downstream” oligonucleotide.

[0035] The term “primer” refers to an oligonucleotide that is capable of acting as a point of initiation of synthesis when placed under conditions in which primer extension is initiated. An oligonucleotide “primer” may occur naturally, as in a purified restriction digest or may be produced synthetically.

[0036] A primer is selected to be “substantially” complementary to a strand of specific sequence of the template. A primer must be sufficiently complementary to hybridize with a template strand for primer elongation to occur. A primer sequence need not reflect the exact sequence of the template. For example, a non-complementary nucleotide fragment may be attached to the 5′ end of the primer, with the remainder of the primer sequence being substantially complementary to the strand. Non-complementary bases or longer sequences can be interspersed into the primer, provided that the primer sequence has sufficient complementarity with the sequence of the template to hybridize and thereby form a template primer complex for synthesis of the extension product of the primer.

[0037] The term “label” as used herein refers to any atom or molecule that can be used to provide a detectable (preferably quantifiable) effect, and that can be attached to a nucleic acid or protein. Labels include but are not limited to dyes; radiolabels such as ³²P; binding moieties such as biotin; haptens such as digoxgenin; luminogenic, phosphorescent or fluorogenic moieties; and fluorescent dyes alone or in combination with moieties that can suppress or shift emission spectra by fluorescence resonance energy transfer (FRET). Labels may provide signals detectable by fluorescence, radioactivity, colorimetry, gravimetry, X-ray diffraction or absorption, magnetism, enzymatic activity, and the like. A label may be a charged moiety (positive or negative charge) or alternatively, may be charge neutral. Labels can include or consist of nucleic acid or protein sequence, so long as the sequence comprising the label is detectable.

[0038] The term “signal” as used herein refers to any detectable effect, such as would be caused or provided by a label or an assay reaction.

[0039] As used herein, the term “detector” refers to a system or component of a system, e.g., an instrument (e.g. a camera, fluorimeter, charge-coupled device, scintillation counter, etc.) or a reactive medium (X-ray or camera film, pH indicator, etc.), that can convey to a user or to another component of a system (e.g., a computer or controller) the presence of a signal or effect. A detector can be a photometric or spectrophotometric system, which can detect ultraviolet, visible or infrared light, including fluorescence or chemiluminescence; a radiation detection system; a spectroscopic system such as nuclear magnetic resonance spectroscopy, mass spectrometry or surface enhanced Raman spectrometry; a system such as gel or capillary electrophoresis or gel exclusion chromatography; or other detection systems known in the art, or combinations thereof.

[0040] The term “sequence variation” as used herein refers to differences in nucleic acid sequence between two nucleic acids. For example, a wild-type structural gene and a mutant form of this wild-type structural gene may vary in sequence by the presence of single base substitutions and/or deletions or insertions of one or more nucleotides. These two forms of the structural gene are said to vary in sequence from one another. A second mutant form of the structural gene may exist. This second mutant form is said to vary in sequence from both the wild-type gene and the first mutant form of the gene.

[0041] The term “nucleotide analog” as used herein refers to modified or non-naturally occurring nucleotides such as 7-deaza purines (i.e., 7-deaza-dATP and 7-deaza-dGTP). Nucleotide analogs include base analogs and comprise modified forms of deoxyribonucleotides as well as ribonucleotides.

[0042] The term “polymorphism” refers to the coexistence of more than one form of a gene or portion thereof. A portion of a gene of which there are at least two different forms, i.e., two different nucleotide sequences,, is referred to as a “polymorphic region of a gene”. A polymorphic region can be a single nucleotide, the identity of which differs in different alleles. A polymorphic region can also be several nucleotides long.

[0043] A “polymorphic gene” refers to a gene having at least one polymorphic region.

[0044] The term “polymorphic locus” is a locus present in a population that shows variation between members of the population (e.g., the most common allele has a frequency of less than 0.95). In contrast, a “monomorphic locus” is a genetic locus at little or no variations seen between members of the population (generally taken to be a locus at which the most common allele exceeds a frequency of 0.95 in the gene pool of the population).

[0045] A “non-human animal” of the invention can include mammals such as rodents, non-human primates, sheep, goats, horses, dogs, cows, chickens, amphibians, reptiles, etc. Preferred non-human animals are selected from the rodent family including rat and mouse, most preferably mouse, though transgenic amphibians, such as members of the Xenopus genus, and transgenic chickens can also provide important tools for understanding and identifying drugs that can affect processes, e.g., embryogenesis and tissue formation.

[0046] The term “operably linked” is intended to mean that the promoter is associated with the nucleic acid in such a manner as to facilitate transcription of the nucleic acid from the promoter.

[0047] The terms “protein”, “polypeptide” and “peptide” are used interchangeably herein when referring to a gene product.

[0048] The term “recombinant protein” refers to a polypeptide which is produced by recombinant DNA techniques, wherein generally, DNA encoding the polypeptide is inserted into a suitable expression vector which is in turn used to transform a host cell to produce the heterologous protein.

[0049] A “regulatory element”, also termed herein “regulatory sequence” is intended to include elements which are capable of modulating transcription from a basic promoter and include elements such as enhancers and silencers. The term “enhancer”, also referred to herein as “enhancer element”, is intended to include regulatory elements capable of increasing, stimulating, or enhancing transcription from a basic promoter. The term “silencer”, also referred to herein as “silencer element” is intended to include regulatory elements capable of decreasing, inhibiting, or repressing transcription from a basic promoter. Regulatory elements are typically present in 5′ flanking regions of genes. However, regulatory elements have also been shown to be present in other regions of a gene, in particular in introns. Regulatory elements may also be present downstream of coding regions. Thus, it is possible that DMI genes have regulatory elements located in introns, exons, coding regions, and 3′ flanking sequences. Such regulatory elements are also intended to be encompassed by the present invention and polymorphisms in such elements can be identified by any of the assays that can be used to identify polymorphisms in regulatory elements in 5′ flanking regions of genes.

[0050] The term “regulatory element” further encompasses “tissue specific” regulatory elements, i.e., regulatory elements that affect expression of a DME gene preferentially in specific cells (e.g., cells of a specific tissue). Gene expression occurs preferentially in a specific cell if expression in this cell type is significantly higher than expression in other cell types. The term “regulatory element” also encompasses non-tissue specific regulatory elements, i.e., regulatory elements that are active in most cell types. Furthermore, a regulatory element can be a constitutive regulatory element, i.e., a regulatory element that constitutively regulates transcription, as opposed to a regulatory element that is inducible, i.e., a regulatory element which is active primarily in response to a stimulus. A stimulus can be, e.g., a molecule, such as a hormone, cytokine, heavy metal, phorbol ester, cyclic AMP (cAMP), or retinoic acid.

[0051] As used herein, the term “transfection” means the introduction of a nucleic acid, e.g., an expression vector, into a recipient cell by nucleic acid-mediated gene transfer. The term “transduction” is generally used herein when the transfection with a nucleic acid is by viral delivery of the nucleic acid. “Transformation”, as used herein, refers to a process in which a cell's genotype is changed as a result of the cellular uptake of exogenous DNA or RNA, and, for example, the transformed cell expresses a recombinant form of a polypeptide or, in the case of anti-sense expression from the transferred gene, the expression of a naturally-occurring form of the recombinant protein is disrupted.

[0052] As used herein, the term “transgene” refers to a nucleic acid sequence that has been introduced into a cell. Daughter cells deriving from a cell in which a transgene has been introduced are also said to contain the transgene (unless it has been deleted). A transgene can encode, e.g., a polypeptide, or an antisense transcript, partly or entirely heterologous, i.e., foreign, to the transgenic animal or cell into which it is introduced, or, is homologous to an endogenous gene of the transgenic animal or cell into which it is introduced, but which is designed to be inserted, or is inserted, into the animal's genome in such a way as to alter the genome of the cell into which it is inserted (e.g., it is inserted at a location which differs from that of the natural gene or its insertion results in a knockout). Alternatively, a transgene can also be present in an episome. A transgene can include one or more transcriptional regulatory sequence and any other nucleic acid, (e.g. intron), that may be necessary for optimal expression of a selected nucleic acid.

[0053] A “transgenic animal” refers to any animal, preferably a non-human animal, e.g. a mammal, bird or an amphibian, in which one or more of the cells of the animal contain heterologous nucleic acid introduced by way of human intervention, such as by transgenic techniques well known in the art. The nucleic acid is introduced into the cell, directly or indirectly by introduction into a precursor of the cell, by way of deliberate genetic manipulation, such as by microinjection or by infection with a recombinant virus. The term genetic manipulation does not include classical cross-breeding, or in vitro fertilization, but rather is directed to the introduction of a recombinant DNA molecule. This molecule may be integrated within a chromosome, or it may be extrachromosomally replicating DNA. In the typical transgenic animals described herein, the transgene causes cells to express a recombinant form of one of a protein, e.g. either agonistic or antagonistic forms. However, transgenic animals in which the recombinant gene is silent are also contemplated. Moreover, “transgenic animal” also includes those recombinant animals in which gene disruption of one or more genes is caused by human intervention, including both recombination and antisense techniques.

[0054] The term “treating” as used herein is intended to encompass curing as well as ameliorating at least one symptom of the condition or disease.

[0055] The term “sample” in the present specification and claims is used in its broadest sense. On the one hand it is meant to include a biological (e.g., human) specimen. On the other hand, a sample may include a specimen of synthetic origin.

[0056] Biological samples may be animal, including human, fluid, solid (e.g., stool) or tissue, as well as liquid and solid food and feed products and ingredients such as dairy items, vegetables, meat and meat by-products, and waste. Biological samples may be obtained from all of the various families of domestic animals, as well as feral or wild animals, including, but not limited to, such animals as ungulates, bear, fish, lagamorphs, rodents, etc.

[0057] The term “source of target nucleic acid” refers to any sample that contains or is suspected to contain nucleic acids (RNA or DNA). Particularly preferred sources of target nucleic acids are biological samples including, but not limited to blood, saliva, cerebral spinal fluid, pleural fluid, milk, lymph, sputum and semen.

[0058] The term “polymerization means” or “polymerization agent” refers to any agent capable of facilitating the addition of nucleoside triphosphates to an oligonucleotide. Preferred polymerization means comprise DNA and RNA polymerases.

[0059] The term “ligation means” or “ligation agent” refers to any agent capable of facilitating the ligation (i.e., the formation of a phosphodiester bond between a 3′-OH and a 5′ P located at the termini of two strands of nucleic acid). Preferred ligation means comprise DNA ligases and RNA ligases.

[0060] The term “reactant” is used herein in its broadest sense. The reactant can comprise, for example, an enzymatic reactant, a chemical reactant or light (e.g., ultraviolet light, particularly short wavelength ultraviolet light is known to break oligonucleotide chains). Any agent capable of reacting with an oligonucleotide to either shorten (i.e., cleave) or elongate the oligonucleotide is encompassed within the term “reactant.”

[0061] The term “nucleic acid sequence” as used herein refers to an oligonucleotide, nucleotide or polynucleotide, and fragments or portions thereof, and to DNA or RNA of genomic or synthetic origin that may be single or double stranded, and represent the sense or antisense strand. Similarly, “amino acid sequence” as used herein refers to peptide or protein sequence.

[0062] The term “peptide nucleic acid” (“PNA”) as used herein refers to a molecule comprising bases or base analogs such as would be found in natural nucleic acid, but attached to a peptide backbone rather than the sugar-phosphate backbone typical of nucleic acids. The attachment of the bases to the peptide is such as to allow the bases to base pair with complementary bases of nucleic acid in a manner similar to that of an oligonucleotide. These small molecules, also designated anti gene agents, stop transcript elongation by binding to their complementary strand of nucleic acid (Nielsen, et al. Anticancer Drug Des. 8:53 63 [1993]).

[0063] As used herein, the terms “purified” or “substantially purified” refer to molecules, either nucleic or amino acid sequences, that are removed from their natural environment, isolated or separated, and are at least 60% free, preferably 75% free, and most preferably 90% free from other components with which they are naturally associated. An “isolated polynucleotide” or “isolated oligonucleotide” is therefore a substantially purified polynucleotide.

[0064] As used herein, the term “kit” refers to any delivery system for delivering materials. In the context of reaction assays, such delivery systems include systems that allow for the storage, transport, or delivery of reaction reagents (e.g., oligonucleotides, enzymes, etc. in the appropriate containers) and/or supporting materials (e.g., buffers, written instructions for performing the assay etc.) from one location to another. For example, kits include one or more enclosures (e.g., boxes) containing the relevant reaction reagents and/or supporting materials. As used herein, the term “fragmented kit” refers to a delivery systems comprising two or more separate containers that each contain a subportion of the total kit components. The containers may be delivered to the intended recipient together or separately. For example, a first container may contain an enzyme for use in an assay, while a second container contains oligonucleotides. The term “fragmented kit” is intended to encompass kits containing Analyte specific reagents (ASR's) regulated under section 520(e) of the Federal Food, Drug, and Cosmetic Act, but are not limited thereto. Indeed, any delivery system comprising two or more separate containers that each contains a subportion of the total kit components are included in the term “fragmented kit.” In contrast, a “combined kit” refers to a delivery system containing all of the components of a reaction assay in a single container (e.g., in a single box housing each of the desired components). The term “kit” includes both fragmented and combined kits.

[0065] As used herein, the term “information” refers to any collection of facts or data. In reference to information stored or processed using a computer system(s), including but not limited to internets, the term refers to any data stored in any format (e.g., analog, digital, optical, etc.). As used herein, the term “information related to a subject” refers to facts or data pertaining to a subject (e.g., a human, plant, or animal). The term “genomic information” refers to information pertaining to a genome including, but not limited to, nucleic acid sequences, genes, allele frequencies, RNA expression levels, protein expression, phenotypes correlating to genotypes, etc. “Allele frequency information” refers to facts or data pertaining allele frequencies, including, but not limited to, allele identities, statistical correlations between the presence of an allele and a characteristic of a subject (e.g., a human subject), the presence or absence of an allele in a individual or population, the percentage likelihood of an allele being present in an individual having one or more particular characteristics, etc.

[0066] The term “cleavage structure” as used herein, refers to a structure that is formed by the interaction of at least one probe oligonucleotide and a target nucleic acid, forming a structure comprising a duplex, the resulting structure being cleavable by a cleavage agent, including but not limited to an enzyme. The cleavage structure is a substrate for specific cleavage by the cleavage means in contrast to a nucleic acid molecule that is a substrate for non-specific cleavage by agents such as phosphodiesterases that cleave nucleic acid molecules without regard to secondary structure (i.e., no formation of a duplexed structure is required).

### DESCRIPTION OF THE DRAWINGS

[0067] FIG. 1 shows sample embodiments of TAQMAN probes.

[0068] FIG. 2 represents one embodiment of the TAQMAN PCR method.

[0069] FIG. 3 shows examples of probes labeled with fluorescent dyes.

[0070] FIG. 4 shows a sample embodiment of an invasive cleavage structure, e.g., for an INVADER assay.

[0071] FIG. 5 shows one embodiment of a FRET probe, e.g., for an INVADER assay.

[0072] FIG. 6 shows one embodiment of an INVADER assay.

[0073] FIG. 7 shows a diagram of an INVADER assay probe in which the allele does not match the probe.

[0074] FIG. 8 shows one embodiment of allele identification using a ligation reaction.

[0075] FIG. 9 shows a drawing of the structure of and SNP position in the ATP-binding cassette subfamily B member 2 (ABCB2) gene.

[0076] FIG. 10 shows a drawing of the structure of and SNP position in the ATP-binding cassette subfamily B member 4 (ABCB4) gene.

[0077] FIG. 11 shows a drawing of the structure of and SNP position in the microsomal epoxide hydrogenase 1 (EPHX1) gene.

[0078] FIG. 12 shows a drawing of the structure of and SNP position in the cytoplasmic epoxide hydrogenase 2 (EPHX2) gene.

[0079] FIG. 13 shows a drawing of the structure of and SNP position in the guanidinoacetate-N-methyltransferase (GAMT) gene.

[0080] FIG. 14 shows a drawing of the structure of and SNP position in the nicotinamide-N-methyltransferase (NNMT) gene.

[0081] FIG. 15 shows a drawing of the structure of and SNP position in the phenylethanolamine-N-methyltransferase (PNMT) gene.

[0082] FIG. 16 shows a drawing of the structure of and SNP position in the phosphatidylethanolamine-N-methyltransferase (PEMT) gene.

[0083] FIG. 17 shows a drawing of the structure of and SNP position in the glutathione-S-methyltransferase 3 (GSTM3) gene.

[0084] FIG. 18 shows a drawing of the structure of and SNP position in the aldehyde dehydrogenase 5 (ALDH5) gene.

[0085] FIG. 19 shows a drawing of the structure of and SNP position in the transglutaminase (TGM1) gene.

[0086] FIG. 20 shows a drawing of the structure of and SNP position in the gamma glutamyltransferase (GGT1) gene.

[0087] FIG. 21 shows a drawing of the structure of and SNP position in the NAD(P)H: quinone oxidetransferase (NQ01) gene.

[0088] FIG. 22 shows a drawing of the structure of and SNP position in the p53-induced gene 3 (PIG3) of a quinone oxide transferase homologue.

[0089] FIG. 23 shows a drawing of the structure of and SNP position in the NRH: quinone oxide transferase 2 (NQ02) gene.

[0090] FIG. 24 shows a drawing of the structure of and SNP position in the sulfotransferase 1A1 (SULT1A1/STP1) gene.

[0091] FIG. 25 shows a drawing of the structure of and SNP position in the sulfotransferase 1A2 (SULT1A2/STP2) gene.

[0092] FIG. 26 shows a drawing of the structure of and SNP position in the sulfotransferase-related protein 3 (SULTX3) gene.

[0093] FIG. 27 shows a drawing of the structure of and SNP position in the tyrosyl protein sulfotransferase (TPST1) gene.

[0094] FIG. 28 shows a drawing of the structure of and SNP position in the tyrosyl protein sulfotransferase (TPST2) gene.

[0095] FIG. 29 shows a drawing of the structure of and SNP position in the sulfotransferase 1A3 (SULT1A3/STM/HAST) gene.

[0096] FIG. 30 shows a drawing of the structure of and SNP position in the cerebroside transferase (CST) gene.

[0097] FIG. 31 shows a drawing of the structure of and SNP position in the sulfotransferase 1C1 (SULT1C1) gene.

[0098] FIG. 32 shows a drawing of the structure of and SNP position in the sulfotransferase 1 C2 (SULT1C2) gene.

[0099] FIG. 33 shows a drawing of the structure of and SNP position in the thyroid hormone sulfotransferase (ST1B2) gene.

[0100] FIG. 34 shows a drawing of the structure of and SNP position in the hydrocarbon sulfotransferase 2 (CHST2) gene.

[0101] FIG. 35 shows a drawing of the structure of and SNP position in the sulfotransferase 2A1 (SULT2A1) gene.

[0102] FIG. 36 shows a drawing of the structure of and SNP position in the sulfotransferase 2B1 (SULT2B1) gene.

[0103] FIG. 37 shows a drawing of the structure of and SNP position in the hydrocarbon sulfotransferase 4 (CHST4) gene.

[0104] FIG. 38 shows a drawing of the structure of and SNP position in the hydrocarbon sulfotransferase 5 (CHST5) gene.

[0105] FIG. 39 shows a drawing of the structure of and SNP position in the HNK-sulfotransferase (NHK-1ST) gene.

[0106] FIG. 40 shows a drawing of the structure of and SNP position in the estrogen sulfotransferase (STE) gene.

[0107] FIG. 41 shows a drawing of the structure of and SNP position in the alcohol dehydrogenase 1 (ADH1) gene.

[0108] FIG. 42 shows a drawing of the structure of and SNP position in the alcohol dehydrogenase 2 (ADH2) gene.

[0109] FIG. 43 shows a drawing of the structure of and SNP position in the alcohol dehydrogenase 3 (ADH3) gene.

[0110] FIG. 44 shows a drawing of the structure of and SNP position in the alcohol dehydrogenase 6 (ADH6) gene.

[0111] FIG. 45 shows a drawing of the structure of and SNP position in the alcohol dehydrogenase 7 (ADH7) gene.

[0112] FIG. 46 shows a drawing of the structure of and SNP position in the short-chained alcohol dehydrogenase family (HEP27) gene.

[0113] FIG. 47 shows a drawing of the structure of and SNP position in the L1 intracellular adhesion molecule (L1CAM) gene.

[0114] FIG. 48 shows a drawing of the structure of and SNP position in the arylalkylamine-N-acetyltransferase (AANAT) gene.

[0115] FIG. 49 shows a drawing of the structure of and SNP position in the N-actyltransferase homologue (ARD1) gene of Saccharomyces cerevisiae.

[0116] FIG. 50 shows a drawing of the structure of and SNP position in the N-actyltransferase 1 (NAT1) gene.

[0117] FIG. 51 shows a drawing of the structure of and SNP position in the N-actyltransferase 2 (NAT2) gene.

[0118] FIG. 52 shows a drawing of the structure of and SNP position in the granzyme A (GZMA) gene.

[0119] FIG. 53 shows a drawing of the structure of and SNP position in the granzyme B (GZMB) gene.

[0120] FIG. 54 shows a drawing of the structure of and SNP position in the esterase D-formylglutathione hydrolase (ESD) gene.

[0121] FIG. 55 shows a drawing of the structure of and SNP position in the dolichyl-diphosphooligosaccharide-protein glycosyltransferase (DDOST) gene.

[0122] FIG. 56 shows a drawing of the structure of and SNP position in the microsomal glutathione-S-transferase (MGST1) gene.

[0123] FIG. 57 shows a drawing of the structure of and SNP position in the alcohol dehydrogenase 5 (ADH5) gene.

[0124] FIG. 58 shows a drawing of the structure of and SNP position in the glutathione-S-transferase M1 (GSTM1) gene.

[0125] FIG. 59 shows a drawing of the structure of and SNP position in the glutathione-S-transferase M2 (GSTM2) gene.

[0126] FIG. 60 shows a drawing of the structure of and SNP position in the glutathione-S-transferase M4 (GSTM4) gene.

[0127] FIG. 61 shows a drawing of the structure of and SNP position in the glutathione-S-transferase Z1 (GSTZ1) gene.

[0128] FIG. 62 shows a drawing of the structure of and SNP position in the glutathione-S-transferase P (GSTZPi) gene.

[0129] FIG. 63 shows a drawing of the structure of and SNP position in the glutathione-S-transferase q1 (GSTT1) gene.

[0130] FIG. 64 shows a drawing of the structure of and SNP position in the microsomal glutathione-S-transferase 1L1 (MGST1L1) gene.

[0131] FIG. 65 shows a drawing of the structure of and SNP position in the microsomal glutathione-S-transferase 2 (MGST2) gene.

[0132] FIG. 66 shows a drawing of the structure of and SNP position in the microsomal glutathione-S-transferase 3 (MGST3) gene.

[0133] FIG. 67 shows a drawing of the structure of and SNP position in the glutathione-S-transferase A1 (GSTA1) gene.

[0134] FIG. 68 shows a drawing of the structure of and SNP position in the glutathione-S-transferase A4 (GSTA4) gene.

[0135] FIG. 69 shows a drawing of the structure of and SNP position in the NADH-ubiquinone oxide reductase 1a subcomplex 1 (NDUFA1) gene.

[0136] FIG. 70 shows a drawing of the structure of and SNP position in the NADH-ubiquinone oxide reductase 1a subcomplex 2 (NDUFA2) gene.

[0137] FIG. 71 shows a drawing of the structure of and SNP position in the NADH-ubiquinone oxide reductase 1a subcomplex 3 (NDUFA3) gene.

[0138] FIG. 72 shows a drawing of the structure of and SNP position in the NADH-ubiquinone oxide reductase 1a subcomplex 5 (NDUFA5) gene.

[0139] FIG. 73 shows a drawing of the structure of and SNP position in the NADH-ubiquinone oxide reductase 1a subcomplex 6 (NDUFA6) gene.

[0140] FIG. 74 shows a drawing of the structure of and SNP position in the NADH-ubiquinone oxide reductase 1a subcomplex 7 (NDUFA7) gene.

[0141] FIG. 75 shows a drawing of the structure of and SNP position in the NADH-ubiquinone oxide reductase 1a subcomplex 8 (NDUFA8) gene.

[0142] FIG. 76 shows a drawing of the structure of and SNP position in the NADH-ubiquinone oxide reductase 1a/b subcomplex 1 (NDUFAB1) gene.

[0143] FIG. 77 shows a drawing of the structure of and SNP position in the NADH-ubiquinone oxide reductase 1a subcomplex 9 (NDUFA9) gene.

[0144] FIG. 78 shows a drawing of the structure of and SNP position in the NADH-ubiquinone oxide reductase Fe—S protein 1 (NDUFS1) gene.

[0145] FIG. 79 shows a drawing of the structure of and SNP position in the NADH-ubiquinone oxide reductase Fe—S protein 3 (NDUFS3) gene.

[0146] FIG. 80 shows a drawing of the structure of and SNP position in the NADH-ubiquinone oxide reductase Fe—S protein 4 (NDUFS4) gene.

[0147] FIG. 81 shows a drawing of the structure of and SNP position in the NADH-ubiquinone oxide reductase Fe—S protein 5 (NDUFS5) gene.

[0148] FIG. 82 shows a drawing of the structure of and SNP position in the NADH-ubiquinone oxide reductase Fe—S protein 6 (NDUFS6) gene.

[0149] FIG. 83 shows a drawing of the structure of and SNP position in the NADH-ubiquinone oxide reductase Fe—S protein 8 (NDUFS8) gene.

[0150] FIG. 84 shows a drawing of the structure of and SNP position in the NADH-ubiquinone oxide reductase 1b subcomplex 3 (NDUFB3) gene.

[0151] FIG. 85 shows a drawing of the structure of and SNP position in the NADH-ubiquinone oxide reductase 1b subcomplex 5 (NDUFB5) gene.

[0152] FIG. 86 shows a drawing of the structure of and SNP position in the NADH-ubiquinone oxide reductase 1b subcomplex 7 (NDUFB7) gene.

[0153] FIG. 87 shows a drawing of the structure of and SNP position in the ATP-binding cassette subfamily A member 1 (ABCA1) gene.

[0154] FIG. 88 shows a drawing of the structure of and SNP position in the catechol-0-methyltransferase (COMT) gene.

[0155] FIG. 89 shows a drawing of the structure of and SNP position in the vitamin-N-transferase (HNMT) gene.

[0156] FIG. 90 shows a drawing of the structure of and SNP position in the cytochrome P450 subfamily 1 (aromatic compound-induced) polypeptide 1 (CYP1A1) gene.

[0157] FIG. 91 shows a drawing of the structure of and SNP position in the cytochrome P450 subfamily 1 (aromatic compound-induced) polypeptide 2 (CYP1A2) gene.

[0158] FIG. 92 shows a drawing of the structure of and SNP position in the cytochrome P450 subfamily 1 (dioxin-induced) polypeptide 1 (CYP1B1) gene.

[0159] FIG. 93 shows a drawing of the structure of and SNP position in the arylacetamide deactylase (AADAC) gene.

[0160] FIG. 94 shows a drawing of the structure of and SNP position in the neuropathy target esterase (NTE) gene.

[0161] FIG. 95 shows a drawing of the structure of and SNP position in the ATP-binding cassette subfamily C (CFTR/MRP) member 2 (MRP2) gene.

[0162] FIG. 96 shows a drawing of the structure of and SNP position in the ATP-binding cassette subfamily B member 1 (ABCB1) gene.

[0163] FIG. 97 shows a drawing of the structure of and SNP position in the ATP-binding cassette subfamily B member 3 (ABCB3) gene.

[0164] FIG. 98 shows a drawing of the structure of and SNP position in the ATP-binding cassette subfamily B member 7 (ABCB7) gene.

[0165] FIG. 99 shows a drawing of the structure of and SNP position in the ATP-binding cassette subfamily B member 8 (ABCB8) gene.

[0166] FIG. 100 shows a drawing of the structure of and SNP position in the ATP-binding cassette subfamily B member 9 (ABCB9) gene.

[0167] FIG. 101 shows a drawing of the structure of and SNP position in the ATP-binding cassette subfamily B member 10 (ABCB10) gene.

[0168] FIG. 102 shows a drawing of the structure of and SNP position in the ATP-binding cassette subfamily B member 11 (ABCB11) gene.

[0169] FIG. 103 shows a drawing of the structure of and SNP position in the cytochrome P450 subfamily IVB polypeptide 1 (CYP4B1) gene.

[0170] FIG. 104 shows a drawing of the structure of and SNP position in the cytochrome P450 subfamily XXVIIA polypeptide 1 (CYP27A1) gene.

[0171] FIG. 105 shows a drawing of the structure of and SNP position in the cytochrome P450 subfamily IVF polypeptide 1 (CYP4F2) gene.

[0172] FIG. 106 shows a drawing of the structure of and SNP position in the cytochrome P450 subfamily 4F polypeptide 3 (CYP4F3) gene.

[0173] FIG. 107 shows a drawing of the structure of and SNP position in the cytochrome P450 subfamily 4F polypeptide 8 (CYP4F8) gene.

[0174] FIG. 108 shows a drawing of the structure of and SNP position in the aldehyde dehydrogenase 1 (ALDH1) gene.

[0175] FIG. 109 shows a drawing of the structure of and SNP position in the aldehyde dehydrogenase 2 (ALDH2) gene.

[0176] FIG. 110 shows a drawing of the structure of and SNP position in the aldehyde dehydrogenase 7 (ALDH7) gene.

[0177] FIG. 111 shows a drawing of the structure of and SNP position in the aldehyde dehydrogenase 8 (ALDH8) gene.

[0178] FIG. 112 shows a drawing of the structure of and SNP position in the aldehyde dehydrogenase 9 (ALDH9) gene.

[0179] FIG. 113 shows a drawing of the structure of and SNP position in the aldehyde dehydrogenase 10 (ALDH10) gene.

[0180] FIG. 114 shows a drawing of the structure of and SNP position in the ATP-binding cassette subfamily C member 7 (ABCC7) gene.

[0181] FIG. 115 shows a drawing of the structure of and SNP position in the ATP-binding cassette subfamily C member 8 (ABCC8) gene.

[0182] FIG. 116 shows a drawing of the structure of and SNP position in the ATP-binding cassette subfamily C member 9 (ABCC9) gene.

[0183] FIG. 117 shows a drawing of the structure of and SNP position in the carboxylesterase 1 (CES1) gene.

[0184] FIG. 118 shows a drawing of the structure of and SNP position in the ATP-binding cassette subfamily A member 4 (AB(CC4) gene.

[0185] FIG. 119 shows a drawing of the structure of and SNP position in the ATP-binding cassette subfamily A member 7 (ABCC7) gene.

[0186] FIG. 120 shows a drawing of the structure of and SNP position in the ATP-binding cassette subfamily G member 1 (ABCG1) gene.

[0187] FIG. 121 shows a drawing of the structure of and SNP position in the ATP-binding cassette subfamily G member 2 (ABCG2) gene.

[0188] FIG. 122 shows a drawing of the structure of and SNP position in the ATP-binding cassette subfamily G member 4 (ABCG4) gene.

[0189] FIG. 123 shows a drawing of the structure of and SNP position in the ATP-binding cassette subfamily E member 1 (ABCE1) gene.

[0190] FIG. 124 shows a drawing of the structure of and SNP position in the carbohydrate sulfotransferase 1 (CHST1) gene.

[0191] FIG. 125 shows a drawing of the structure of and SNP position in the carbohydrate sulfotransferase 3 (CHST3) gene.

[0192] FIG. 126 shows a drawing of the structure of and SNP position in the NADH: ubiquinone dehydrogenase flavoprotein 1 (NDUFV1) gene.

[0193] FIG. 127 shows a drawing of the structure of and SNP position in the NADH: ubiquinone dehydrogenase flavoprotein 2 (NDUFV2) gene.

[0194] FIG. 128 shows a drawing of the structure of and SNP position in the NADH: ubiquinone dehydrogenase flavoprotein 3 (NDUFV3) gene.

[0195] FIG. 129 shows a drawing of the structure of and SNP position in the NADH: ubiquinone oxide reductase A10 (NDUFA10) gene.

[0196] FIG. 130 shows a drawing of the structure of and SNP position in the high-mobility group protein 17-like 1 (HMG17L1) gene.

[0197] FIG. 131 shows a drawing of the structure of and SNP position in the UDP glycoxyl transferase 2 family polypeptide A1 (UGT2A1) gene.

[0198] FIG. 132 shows a drawing of the structure of and SNP position in the human organic anion transporter polypeptide 1 (hOATP1) gene.

[0199] FIG. 133 shows a drawing of the structure of and SNP position in the human organic anion transporter polypeptide 2 (hOATP2) gene.

[0200] FIG. 134 shows a drawing of the structure of and SNP position in the human organic anion transporter polypeptide 8 (hOATP8) gene.

[0201] FIG. 135 shows a drawing of the structure of and SNP position in the human organic anion transporter 1 (hOAT1) gene.

[0202] FIG. 136 shows a drawing of the structure of and SNP position in the human organic anion transporter 2 (hOAT2) gene.

[0203] FIG. 137 shows a drawing of the structure of and SNP position in the human organic anion transporter 3 (hOAT3) gene.

[0204] FIG. 138 shows a drawing of the structure of and SNP position in the aldehyde dehydrogenase 1 family member A2 (ALDH1A2) gene.

[0205] FIG. 139 shows a drawing of the structure of and SNP position in the aldehyde dehydrogenase 1 family member A3 (ALDH1A3) gene.

[0206] FIG. 140 shows a drawing of the structure of and SNP position in the formyltetrahydroforate dehydrogenase (FTHFD/ALDH1L1) gene.

[0207] FIG. 141 shows a drawing of the structure of and SNP position in the cytochrome P450 subfamily IIIA (aromatic compound-induced) polypeptide 4 (CYP3A4) gene.

[0208] FIG. 142 shows graph of the results of typing performed on two different groups of subjects using the INVADER assay method.

[0209] FIG. 143 shows a summary of genetic information.

[0210] FIG. 144A shows a structure of ATP-binding cassette subfamily A member 1 (ABCA1) gene and the SNP location therein.

[0211] Accession No.: AF275948.1 and AL359846.11

[0212] FIG. 144B shows a structure of ATP-binding cassette subfamily A member 1 (ABCA1) gene and the SNP location therein. (continuation of FIG. 144A)

[0213] Accession No.: AF275948.1 and AL359846.11

[0214] FIG. 145 shows a structure of ATP-binding cassette subfamily A member 4 (ABCA4) gene and the SNP location therein.

[0215] Accession No.: NT_{—}019258.1

[0216] FIG. 146 shows a structure of ATP-binding cassette subfamily A member 7 (ABCA7) gene and the SNP location therein.

[0217] Accession No.: NT_{—}025194.1

[0218] FIG. 147 shows a structure of ATP-binding cassette subfamily A member 8 (ABCA8) gene and the SNP location therein.

[0219] Accession No.: AC005922.1 and AC015844.5

[0220] FIG. 148 shows a structure of ATP-binding cassette subfamily B member 1 (ABCB1) gene and the SNP location therein.

[0221] Accession No.: AC002457.1 and AC005068.1

[0222] FIG. 149 shows a structure of ATP-binding cassette subfamily B member 4 (ABCB4) gene and the SNP location therein.

[0223] Accession No.: AC079591.1, AC079303.3 and AC005045.2

[0224] FIG. 150 shows a structure of ATP-binding cassette subfamily B member 7 (ABCB7) gene and the SNP location therein.

[0225] Accession No.: AL360179.3 and AC002417.1

[0226] FIG. 151 shows a structure of ATP-binding cassette subfamily B member 8 (ABCB8) gene and the SNP location therein.

[0227] Accession No.: AC010973.4

[0228] FIG. 152 shows a structure of ATP-binding cassette subfamily B member 9 (ABCB9) gene and the SNP location therein.

[0229] Accession No.: AC026362.9 and AC073857.10

[0230] FIG. 153 shows a structure of ATP-binding cassette subfamily B member 10 (ABCB10) gene and the SNP location therein.

[0231] Accession No.: AL121990.9

[0232] FIG. 154 shows a structure of ATP-binding cassette subfamily B member 11 (ABCB11) gene and the SNP location therein.

[0233] Accession No.: AC008177.3 and AC069137.3

[0234] FIG. 155 shows a structure of ATP-binding cassette subfamily C member 1 (ABCC1) gene and the SNP location therein.

[0235] Accession No.: AC026452.5 and AC025778.4

[0236] FIG. 156 shows a structure of ATP-binding cassette subfamily C member 2 (ABCC2) gene and the SNP location therein.

[0237] Accession No.: AL392107.4

[0238] FIG. 157 shows a structure of ATP-binding cassette subfamily C member 3 (ABCC3) gene and the SNP location therein.

[0239] Accession No.: AC004590.1 and AC005921.3

[0240] FIG. 158A shows a structure of ATP-binding cassette subfamily C member 4 (ABCC4) gene and the SNP location therein.

[0241] Accession No.: AL356257.11, AL157818.12 and AL139381.12

[0242] FIG. 158B shows a structure of ATP-binding cassette subfamily C member 4 (ABCC4) gene and the SNP location therein. (continuation of FIG. 158A)

[0243] Accession No.: AL356257.11, AL15,7818.12, and AL139381.12

[0244] FIG. 159 shows a structure of ATP-binding cassette subfamily C member 5 (ABCC5) gene and the SNP location therein.

[0245] Accession No.: AC068644.5

[0246] FIG. 160 shows a structure of ATP-binding cassette subfamily C member 7 (ABCC7) gene and the SNP location therein.

[0247] Accession No.: AC000111.1 and AC000061.1

[0248] FIG. 161 shows a structure of ATP-binding cassette subfamily C member 8 (ABCC8) gene and the SNP location therein.

[0249] Accession No.: AC000406.1

[0250] FIG. 162 shows a structure of ATP-binding cassette subfamily C member 9 (ABCC9) gene and the SNP location therein.

[0251] Accession No.: AC084806.9 and AC008250.23

[0252] FIG. 163 shows a structure of ATP-binding cassette subfamily D member 1 (ABCD1) gene and the SNP location therein.

[0253] Accession No.: U52111.2

[0254] FIG. 164 shows a structure of ATP-binding cassette subfamily D member 3 (ABCD3) gene and the SNP location therein.

[0255] Accession No.: NT_{—}019284.3

[0256] FIG. 165 shows a structure of ATP-binding cassette subfamily D member 4 (ABCD4) gene and the SNP location therein.

[0257] Accession No.: AC005519.3

[0258] FIG. 166 shows a structure of ATP-binding cassette subfamily G member 1 (ABCG1) gene and the SNP location therein.

[0259] Accession No.: AP001746.1

[0260] FIG. 167 shows a structure of ATP-binding cassette subfamily G member 2 (ABCG2) gene and the SNP location therein.

[0261] Accession No.: NT_{—}022959.2

[0262] FIG. 168 shows a structure of ATP-binding cassette subfamily G member 4 (ABCG4) gene and the SNP location therein.

[0263] Accession No.: AP001315.3

[0264] FIG. 169 shows a structure of ATP-binding cassette subfamily G member 5 (ABCG5) gene and the SNP location therein.

[0265] Accession No.: AC084265.2 and AC011242.8

[0266] FIG. 170 shows a structure of ATP-binding cassette subfamily G member 8 (ABCG8) gene and the SNP location therein.

[0267] Accession No.: AC084265.2

[0268] FIG. 171 shows a structure of ATP-binding cassette subfamily E member 1 (ABCE1) gene and the SNP location therein.

[0269] Accession No.: NT_{—}006296.2

[0270] FIG. 172 shows a structure of ATP -binding cassette subfamily F member 1 (ABCF1) gene and the SNP location therein.

[0271] Accession No.: NT_{—}007592.3

[0272] FIG. 173 shows a structure of organic anion transporter 1 (OAT1) gene and the SNP location therein.

[0273] Accession No.: AP001858.3, AJ249369.1, and AP000438.4

[0274] FIG. 174 shows a structure of organic anion transporter 2 (OAT2) gene and the SNP location therein.

[0275] Accession No.: AC26532.3

[0276] FIG. 175 shows a structure of organic anion transporter 3 (OAT3) gene and the SNP location therein.

[0277] Accession No.: AP001858.3

[0278] FIG. 176 shows a structure of organic anion transporter polypeptide 1 (OATP1) gene and the SNP location therein.

[0279] Accession No.: AC022224.22

[0280] FIG. 177 shows a structure of organic anion transporter polypeptide 2 (OATP2) gene and the SNP location therein.

[0281] Accession No.: NT_{—}024399.2

[0282] FIG. 178 shows a structure of organic anion transporter polypeptide 8 (OATP8) gene and the SNP location therein.

[0283] Accession No.: NT_{—}024399.2

[0284] FIG. 179 shows a structure of transporter 1 ATP-binding cassette subfamily B (TAP1) gene and the SNP location therein.

[0285] Accession No.: X66401.1

[0286] FIG. 180 shows a structure of transporter 2 ATP-binding cassette subfamily B (TAP2) gene and the SNP location therein.

[0287] Accession No.: X6640 1.1

[0288] FIG. 181 shows a structure of SLC22A4 solute carrier family 22 (organic cation transporter) member 4 (OCTN1) gene and the SNP location therein.

[0289] Accession No.: AC008599.6

[0290] FIG. 182 shows a structure of SLC22A5 solute carrier family 22 (organic cation transporter) member 5 (OCTN2) gene and the SNP location therein.

[0291] Accession No.: AC023861.3

[0292] FIG. 183 shows a structure of SLC22A1 solute carrier family 22 (organic cation transporter) member 1 (OCT1) gene and the SNP location therein.

[0293] Accession No.: AL35625.5

[0294] FIG. 184 shows a structure of SLC22A2 solute carrier family 22 (organic cation transporter) member 2 (OCT2) gene and the SNP location therein.

[0295] Accession No.: AL162582.18

[0296] FIG. 185 shows a structure of SLC10A2 solute carrier family 10 (sodium/bile acid cotransporter family) member 2 (NTCP) gene and the SNP location therein.

[0297] Accession No.: AL157789.6

[0298] FIG. 186 shows a structure of SLC15A1 solute carrier family 15 (oligopeptide transporter) member 1 (PEPT1) gene and the SNP location therein.

[0299] Accession No.: AL353574.8 and AL391670.6

[0300] FIG. 187 shows a structure of microsomal epoxide hydrolase 1 (EPHX1) gene and the SNP location therein.

[0301] Accession No.: AC058782.8

[0302] FIG. 188 shows a structure of cytoplasmic epoxide hydrolase (EPHX2) gene and the SNP location therein.

[0303] Accession No.: AC010856.3

[0304] FIG. 189 shows a structure of catechol-O-methyl transferase (COMT) gene and the SNP location therein.

[0305] Accession No.: AC000080.2

[0306] FIG. 190 shows a structure of guanidinoacetate N-methyl transferase (GAMT) gene and the SNP location therein.

[0307] Accession No.: NT_{—}000879.1

[0308] FIG. 191 shows a structure of phenyl ethanolamine N-methyl transferase (PNMT) gene and the SNP location therein.

[0309] Accession No.: AC040933.3

[0310] FIG. 192 shows a structure of histamine N-methyl transferase (HNMT) gene and the SNP location therein.

[0311] Accession No.: AC019304.3

[0312] FIG. 193 shows a structure of nicotinamide N-methyl transferase (NNMT) gene and the SNP location therein.

[0313] Accession No.: AC019290.3

[0314] FIG. 194 shows a structure of phosphatidylethanolamine N-methyl transferase (PEMT) gene and the SNP location therein.

[0315] Accession No.: AC020558.3

[0316] FIG. 195 shows a structure of aldehyde dehydrogenase 1 family member A1 (ALDH1A1) gene and the SNP location therein.

[0317] Accession No.: AC009284.2 and AL162416.3

[0318] FIG. 196 shows a structure of aldehyde dehydrogenase 1 family member A2 (ALDH1A2) gene and the SNP location therein.

[0319] Accession No.: AC025431.7 and AC012653.8

[0320] FIG. 197 shows a structure of aldehyde dehydrogenase 1 family member A3 (ALDH1A3) gene and the SNP location therein.

[0321] Accession No.: AC015712.7

[0322] FIG. 198 shows a structure of aldehyde dehydrogenase 1 family member B1 (ALDH1B1) gene and the SNP location therein.

[0323] Accession No.: AL135785.9

[0324] FIG. 199A shows a structure of formyl tetrahydrofolate dehydrogenase (ALDH1L1) gene and the SNP location therein.

[0325] Accession No.: AC079848.6

[0326] FIG. 199B shows a structure of fornyl tetrahydrofolate dehydrogenase (ALDH1L1) gene and the SNP location therein. (continuation of FIG. 199A)

[0327] Accession No.: AC079848.6

[0328] FIG. 200 shows a structure of aldehyde dehydrogenase 2 (ALDH2) gene and the SNP location therein.

[0329] Accession No.: AC002996.1 and AC003029.2

[0330] FIG. 201 shows a structure of aldehyde dehydrogenase 3 family member A1 (ALDH3A1) gene and the SNP location therein.

[0331] Accession No.: AC005722.1

[0332] FIG. 202 shows a structure of aldehyde dehydrogenase 3 family member A2 (ALDH3A2) gene and the SNP location therein.

[0333] Accession No.: AC005722.1

[0334] FIG. 203 shows a structure of aldehyde dehydrogenase 3 family member B1 (ALDH3B1) gene and the SNP location therein.

[0335] Accession No.: AC004923.2

[0336] FIG. 204 shows a structure of aldehyde dehydrogenase 3 family member B2 (ALDH3B2) gene and the SNP location therein.

[0337] Accession No.: AC021987.3

[0338] FIG. 205 shows a structure of aldehyde dehydrogenase 5 family member A1 (ALDH5A1) gene and the SNP location therein.

[0339] Accession No.: AL031230.1

[0340] FIG. 206 shows a structure of aldehyde dehydrogenase 6 family member A1 (ALDH6A1) gene and the SNP location therein.

[0341] Accession No.: AC005484.2

[0342] FIG. 207 shows a structure of aldehyde dehydrogenase 8 family member A1 (ALDH8A1) gene and the SNP location therein.

[0343] Accession No.: AL445190.9 and AL021939.1

[0344] FIG. 208 shows a structure of aldehyde dehydrogenase 9 family member A1 (ALDH9A1) gene and the SNP location therein.

[0345] Accession No.: AL451074.4

[0346] FIG. 209 shows a structure of alcohol dehydrogenase 1 (ADH1) gene and the SNP location therein.

[0347] Accession No.: AP002027.1

[0348] FIG. 210 shows a structure of alcohol dehydrogenase 2 (ADH2) gene and the SNP location therein.

[0349] Accession No.: AP002027.1

[0350] FIG. 211 shows a structure of alcohol dehydrogenase 3 (ADH3) gene and the SNP location therein.

[0351] Accession No.: AP002027.1

[0352] FIG. 212 shows a structure of alcohol dehydrogenase 4 (ADH4) gene and the SNP location therein.

[0353] Accession No.: AP002026.1

[0354] FIG. 213 shows a structure of alcohol dehydrogenase 5 (ADH5) gene and the SNP location therein.

[0355] Accession No.: AC019131.4

[0356] FIG. 214 shows a structure of alcohol dehydrogenase 6 (ADH6) gene and the SNP location therein.

[0357] Accession No.: AP002026.1

[0358] FIG. 215 shows a structure of alcohol dehydrogenase 7 (ADH7) gene and the SNP location therein.

[0359] Accession No.: AC027065.3

[0360] FIG. 216 shows a structure of short-chain alcohol dehydrogenase family gene (HEP27) and the SNP location therein.

[0361] Accession No.: AL135999.3

[0362] FIG. 217 shows a structure of UDP glycosyltransferase 1 family polypeptide A1 (UGT1A1) and the SNP location therein.

[0363] Accession No.: AC006985.2

[0364] FIG. 218 shows a structure of UDP glycosyltransferase 2 family polypeptide A1 (UGT2A1) and the SNP location therein.

[0365] Accession No.: AC011254.3

[0366] FIG. 219 shows a structure of UDP glycosyltransferase 2 family polypeptide B15 (UGT2B15) and the SNP location therein.

[0367] Accession No.: AC019173.4

[0368] FIG. 220 shows a structure of UDP glycosyltransferase 8 (UGT8) and the SNP location therein.

[0369] Accession No.: U31353.1

[0370] FIG. 221 shows a structure of glutathione S transferase A1 (GSTA1) gene and the SNP location therein.

[0371] Accession No.: AC021133.4

[0372] FIG. 222 shows a structure of glutathione S transferase A4 (GSTA4) gene and the SNP location therein.

[0373] Accession No.: AC025085.4

[0374] FIG. 223 shows a structure of glutathione S transferase M1 (GSTM1) gene and the SNP location therein.

[0375] Accession No.: AC000032.7

[0376] FIG. 224 shows a structure of glutathione S transferase M2 (GSTM2) gene and the SNP location therein.

[0377] Accession No.: AC000031.5

[0378] FIG. 225 shows a structure of glutathione S transferase Z1 (GSTZ1) gene and the SNP location therein.

[0379] Accession No.: AC007954.7

[0380] FIG. 226 shows a structure of glutathione S transferase Pi (GSTPi) gene and the SNP location therein.

[0381] Accession No.: X08058.1 and M24485.1

[0382] FIG. 227 shows a structure of glutathione S transferase T1 (GSTT1) gene and the SNP location therein.

[0383] Accession No.: AF240786.1 and AP000351.3

[0384] FIG. 228 shows a structure of microsomal glutathione S transferase 1 (MGST1) gene and the SNP location therein.

[0385] Accession No.: AC007528.5

[0386] FIG. 229 shows a structure of microsomal glutathione S transferase 1-like 1 (MGST1L1) gene and the SNP location therein.

[0387] Accession No.: AC007936.2

[0388] FIG. 230 shows a structure of microsomal glutathione S transferase T2 (MGST2) gene and the SNP location therein.

[0389] Accession No.: AC019049.4

[0390] FIG. 231 shows a structure of microsomal glutathione S transferase T3 (MGST3) gene and the SNP location therein.

[0391] Accession No.: AC064827.2

[0392] FIG. 232 shows a structure of sulfotransferase 1A1 (SULT1A1/STP1) gene and the SNP location therein.

[0393] Accession No.: U52852.2

[0394] FIG. 233 shows a structure of sulfotransferase 1A2 (SULT1A2/STP2) gene and the SNP location therein.

[0395] Accession No.: U33886.1, U34804.1 and AC020765.5

[0396] FIG. 234 shows a structure of sulfctransferase 1A3 (SULT1A3/STM/HAST) gene and the SNP location therein

[0397] Accession No.: L34160.1 and AC012645.4

[0398] FIG. 235 shows a structure of sulfotransferase 1C1 (SULT1C1) gene and the SNP location therein.

[0399] Accession No.: AC019100.4

[0400] FIG. 236 shows a structure of sulfotransferase 1C2 (SULT1C2) gene and the SNP location therein.

[0401] Accession No.: AF186263.1

[0402] FIG. 237 shows a structure of sulfotransferase 2A1 (SULT2A1) gene and the SNP location therein.

[0403] Accession No.: AC024582.4, AC008745.5, NT011190.1, and AC024582.4

[0404] FIG. 238 shows a structure of sulfotransferase 2B1 (SULT2B1) gene and the SNP location therein.

[0405] Accession No.: AC040922.2 and AC008403.6

[0406] FIG. 239 shows a structure of sulfotransferase-associated protein 3 (SULTX3) gene and the SNP location therein.

[0407] Accession No.: Z97055.1

[0408] FIG. 240 shows a structure of tyrosyl protein sulfotransferase 1 (TPST1) gene and the SNP location therein.

[0409] Accession No.: AC026281.5

[0410] FIG. 241 shows a structure of tyrosyl protein sulfotransferase 2 (TPST2) gene and the SNP location therein.

[0411] Accession No.: Z95115.1

[0412] FIG. 242 shows a structure of cerebroside sulfotransferase (CST) gene and the SNP location therein.

[0413] Accession No.: AC005006.2

[0414] FIG. 243 shows a structure of thyroid hormone sulfotransferase (ST1B2) gene and the SNP location therein.

[0415] Accession No.: AC027059.2

[0416] FIG. 244 shows a structure of carbohydorate sulfotransferase 1 (CHST1) gene and the SNP location therein.

[0417] Accession No.: NT_{—}008982.1

[0418] FIG. 245 shows a structure of carbohydorate sulfotransferase 2 (CHST2) gene and the SNP location therein.

[0419] Accession No.: AC055737.10

[0420] FIG. 246 shows a structure of carbohydorate sulfotransferase 3 (CHST3) gene and the SNP location therein.

[0421] Accession No.: AC073370.3

[0422] FIG. 247 shows a structure of carbohydorate sulfotransferase 4 (CHST4) gene and the SNP location therein.

[0423] Accession No.: AC010547.5

[0424] FIG. 248 shows a structure of carbohydorate sulfotransferase 5 (CHST5) gene and the SNP location therein.

[0425] Accession No.: AC025287.3

[0426] FIG. 249 shows a structure of HNK-sulfotransferase (HNK-1ST) gene and the SNP location therein.

[0427] Accession No.: AC012493.4

[0428] FIG. 250 shows a structure of estrogen sulfotransferase (STE) gene and the SNP location therein.

[0429] Accession No.: AC074273.1

[0430] FIG. 251 shows a structure of NAD (P)H: quinone oxidoreductase 1 (NQO1) gene and the SNP location therein.

[0431] Accession No.: M81596.1

[0432] FIG. 252 shows a structure of NRH: quinone oxidoreductase 2 (NQO2) gene and the SNP location therein.

[0433] Accession No.: AB050248.1

[0434] FIG. 253 shows a structure of p53-inducible gene 3 (PIG3) in a quinone oxidoreductase homolog and the SNP location therein.

[0435] Accession No.: AC008073.3

[0436] FIG. 254 shows a structure of NADH-dehydrogenase(ubiquinone) 1α-subcomplex 1 (NDUFA1) gene and the SNP location therein.

[0437] Accession No.: AC002477.1

[0438] FIG. 255 shows a structure of NADH-dehydrogenase(ubiquinone) 1α-subcomplex 2 (NDUFA2) gene and the SNP location therein.

[0439] Accession No.: AB054976.1

[0440] FIG. 256 shows a structure of NADH-dehydrogenase(ubiquinone) 1α-subcomplex 3 (NDUFA3) gene and the SNP location therein.

[0441] Accession No.: AC009968.6

[0442] FIG. 257 shows a structure of NADH-dehydrogenase(ubiquinone) 1α-subcomplex 5 (NDUFA5) gene and the SNP location therein.

[0443] Accession No.: AC073323.5

[0444] FIG. 258 shows a structure of NADH-dehydrogenase(ubiquinone) 1α-subcomplex 6 (NDUFA6) gene and the SNP location therein.

[0445] Accession No.: AL021878.1

[0446] FIG. 259 shows a structure of NADH-dehydrogenase(ubiquinone) 1α-subcomplex 7 (NDUFA7) gene and the SNP location therein.

[0447] Accession No.: AC010323.6

[0448] FIG. 260 shows a structure of NADH-dehydrogenase(ubiquinone) 1α-subcomplex 8 (NDUFA8) gene and the SNP location therein.

[0449] Accession No.: AL162423.10

[0450] FIG. 261 shows a structure of NADH-dehydrogenase(ubiquinone) 1α-subcomplex 9 (NDUFA9) gene and the SNP location therein.

[0451] Accession No.: AC005832.1

[0452] FIG. 262 shows a structure of NADH-dehydrogenase(ubiquinone) 1α-subcomplex 10 (NDUFA10) gene and the SNP location therein.

[0453] Accession No.: AC013469.8

[0454] FIG. 263 shows a structure of NADH-dehydrogenase(ubiquinone) 1α/β-subcomplex 1 (NDUFAB1) gene and the SNP location therein.

[0455] Accession No.: AC008870.6

[0456] FIG. 264 shows a structure of NADH-dehydrogenase(ubiquinone) 1β-subcomplex 3 (NDUFB3) gene and the SNP location therein.

[0457] Accession No.: AC007272.3

[0458] FIG. 265 shows a structure of NADH-dehydrogenase(ubiquinone) 1β-subcomplex 5 (NDUFB5) gene and the SNP location therein.

[0459] Accession No.: AC068361.2

[0460] FIG. 266 shows a structure of NADH-dehydrogenase(ubiquinone) 1β-subcomplex 7 (NDUFB7) gene and the SNP location therein.

[0461] Accession No.: AC010527.4

[0462] FIG. 267 shows a structure of NADH-dehydrogenase(ubiquinone) Fe—S protein 1 (NDUFS1) gene and the SNP location therein.

[0463] Accession No.: AC007383.4

[0464] FIG. 268 shows a structure of NADH-dehydrogenase(ubiquinone) Fe—S protein 3 (NDUFS3) gene and the SNP location therein.

[0465] Accession No.: AC067943.4

[0466] FIG. 269 shows a structure of NADH-dehydrogenase(ubiquinone) Fe—S protein 4 (NDUFS4) gene and the SNP location therein.

[0467] Accession No.: AC024569.3

[0468] FIG. 270 shows a structure of NADH-dehydrogenase(ubiquinone) Fe—S protein 5 (NDUFS5) gene and the SNP location therein.

[0469] Accession No.: AL139015.5

[0470] FIG. 271 shows a structure of NADH-dehydrogenase(ubiquinone) Fe—S protein 6 (NDUFS6) gene and the SNP location therein.

[0471] Accession No.: AC026443.2

[0472] FIG. 272 shows a structure of NADH-dehydrogenase(ubiquinone) Fe—S protein 8 (NDUFS8) gene and the SNP location therein.

[0473] Accession No.: AC034259.2

[0474] FIG. 273 shows a structure of NADH-dehydrogenase(ubiquinone) flavoprotein 1 (NDUFV1) gene and the SNP location therein.

[0475] Accession No.: NT_{—}009304.2

[0476] FIG. 274 shows a structure of NADH-dehydrogenase(ubiquinone) flavoprotein 2 (NDUFV2) gene and the SNP location therein.

[0477] Accession No.: NT_{—}011024.2

[0478] FIG. 275 shows a structure of NADH-dehydrogenase(ubiquinone) flavoprotein 3 (NDUFV3) gene and the SNP location therein.

[0479] Accession No.: AP001748.1

[0480] FIG. 276 shows a structure of gamma-glutamyl transferase 1 (GGT1) gene and the SNP location therein.

[0481] Accession No.: D87002.1

[0482] FIG. 277 shows a structure of transglutaminase 1 (TGM1) gene and the SNP location therein.

[0483] Accession No.: M98447.1

[0484] FIG. 278 shows a structure of cytochrome P450 subfamily 1 (aromatic compound-inducible) polypeptide 1 (CYP1A1) gene and the SNP location therein.

[0485] Accession No.: X04300.1 and AC020705.4

[0486] FIG. 279 shows a structure of cytochrome P450 subfamily 1 (aromatic compound-inducible) polypeptide 2 (CYP1A2) gene and the SNP location therein.

[0487] Accession No.: AC020705.4

[0488] FIG. 280 shows a structure of cytochrome P450 subfamily 1 (dioxin-inducible) polypeptide 1 (CYP1B1) gene and the SNP location therein.

[0489] Accession No.: AC009229.4

[0490] FIG. 281 shows a structure of cytochrome P450 subfamily 3A (aromatic compound-inducible) polypeptide 4 (CYP3A4) gene and the SNP location therein.

[0491] Accession No.: AF280107.1

[0492] FIG. 282 shows a structure of cytochrome P450 subfamily 3A (aromatic compound-inducible) polypeptide 5 (CYP3A5) gene and the SNP location therein.

[0493] Accession No.: AC005020.5

[0494] FIG. 283 shows a structure of cytochrome P450 subfamily 3A polypeptide 7 (CYP3A7) gene and the SNP location therein.

[0495] Accession No.: AF280107.1

[0496] FIG. 284 shows a structure of cytochrome P450 polypeptide 43 (CYP3A43) gene and the SNP location therein.

[0497] Accession No.: AC011904.3

[0498] FIG. 285 shows a structure of cytochrome P450 subfamily IVB polypeptide 1 (CYP4B1) gene and the SNP location therein.

[0499] Accession No.: AL356793.10

[0500] FIG. 286 shows a structure of cytochrome P450 subfamily IVF polypeptide 2 (CYP4F2) gene and the SNP location therein.

[0501] Accession No.: AC005336.1

[0502] FIG. 287 shows a structure of cytochrome P450 subfamily IVF polypeptide 3 (CYP4F3) gene and the SNP location therein.

[0503] Accession No.: AD000685. 1

[0504] FIG. 288 shows a structure of cytochrome P450 subfamily IVF polypeptide 8 (CYP4F8) gene and the SNP location therein.

[0505] Accession No.: AC068845.3

[0506] FIG. 289 shows a structure of cytochrome P450 subfamily XXVIIA polypeptide 1 (CYP27A1) gene and the SNP location therein.

[0507] Accession No.: AC009974.7

[0508] FIG. 290 shows a structure of cytochrome P450 subfamily XXVIIB polypeptide 1 (CYP27B1) gene and the SNP location therein.

[0509] Accession No.: AC025165.27

[0510] FIG. 291 shows a structure of allylacetamide deacetylase (AADAC) gene and the SNP location therein.

[0511] Accession No.: AC068647.4

[0512] FIG. 292 shows a structure of carboxyl esterase 1 (CES1) gene and the SNP location therein

[0513] Accession No.: AC007602.4

[0514] FIG. 293 shows a structure of carboxyl esterase 2 (CES2) gene and the SNP location therein

[0515] Accession No.: AC027131.4

[0516] FIG. 294 shows a structure of granzyme A (GZMA) gene and the SNP location therein.

[0517] Accession No.: AC091977.1

[0518] FIG. 295 shows a structure of granzyme B (GZMB) gene and the SNP location therein.

[0519] Accession No.: AL136018.3

[0520] FIG. 296 shows a structure of esterase D/formylglutathione hydrolase (ESD) gene and the SNP location therein.

[0521] Accession No.: AL136958.9

[0522] FIG. 297A shows a structure of carboxyl ester lipase (bile salt-stimulated lipase) (CEL) gene and the SNP location therein.

[0523] Accession No.: AL138750.8, AL162417.20 and AF072711.1

[0524] FIG. 297B shows a structure of carboxyl ester lipase (bile salt-stimulated lipase) (CEL) gene and the SNP location therein. (continuation of FIG. 297A)

[0525] Accession No.: AL138750., AL162417.20 and AF072711.1

[0526] FIG. 298 shows a structure of interLeukin 17 (cytotoxic T lymphocyte-associated serine esterase 8) (IL17) gene and the SNP location therein.

[0527] Accession No.: AL355513.11

[0528] FIG. 299 shows a structure of ubiquitin carboxyl terminal esterase L3 (ubiquitin thiol esterase) (UCHL3) gene and the SNP location therein.

[0529] Accession No.: AL137244.28

[0530] FIG. 300 shows a structure of dolichyl-diphosphooligosaccharide-protein glycosyltransferase (DDOST) gene and the SNP location therein.

[0531] Accession No.: D89060

[0532] FIG. 301 shows a structure of neuropathy target esterase (NTE) gene and the SNP location therein.

[0533] Accession No.: AC021153

[0534] FIG. 302 shows a structure of L1 cell adhesion molecule (L1CAM) gene and the SNP location therein.

[0535] Accession No.: U52112

[0536] FIG. 303 shows a structure of arylalkylamine N-acetyltransferase (AANAT) gene and the SNP location therein.

[0537] Accession No.: U40391

[0538] FIG. 304 shows a structure of N-acetyltransferase homolog (ARD1) gene of Saccharomyces cerevisiae and the SNP location therein.

[0539] Accession No.: U52112

[0540] FIG. 305 shows a structure of N-acetyltransferase (NAT1) gene and the SNP location therein.

[0541] Accession No.: X17059

[0542] FIG. 306 shows a structure of N-acetyltransferase 2 (NAT2) gene and the SNP location therein.

[0543] Accession No.: D10870

[0544] FIG. 307 shows a structure of ATP-binding cassette subfamily B member 2 (ABCB2) gene and the SNP location therein.

[0545] Accession No.: X66401

[0546] FIG. 308 shows a structure of ATP-binding cassette subfamily B member 3 (ABCB3) gene and the SNP location therein.

[0547] Accession No.: X66401

[0548] FIG. 309 shows a structure of glutathione S transferase M3 (GSTM3) gene and the SNP location therein.

[0549] Accession No.: AF043105.1

[0550] FIG. 310 shows a structure of glutathione S transferase M4 (GSTM4) gene and the SNP location therein.

[0551] Accession No.: M96233.1

[0552] FIG. 311 shows a structure of aldehyde dehydrogenase 7 (ALDH7) gene and the SNP location therein.

[0553] Accession No.: AC004923

[0554] FIG. 312 shows a structure of high-mobility group protein 17-like 1 (HMG17L1) gene and the SNP location therein.

[0555] Accession No.: Z97055.1

[0556] FIG. 313 shows a printed representation of submissions from Laboratory for Genotyping, The SNP Research Center, The Institute of Physical and Chemical Research (RIKEN) on the IMS-JST JSNP database website

### GENERAL DESCRIPTION OF THE INVENTION

[0557] The present invention provides a method of analysis of drug metabolizing enzymes by analysis of SNPs associated with their encoding genes. In some embodiments, the method of the present invention can be used in the selection of drugs based on, e.g., particular characteristics of an individual patient or on characteristics of a target disease.

[0558] In some embodiments, the present invention provides a method for detecting a genetic polymorphism associated with a DME, wherein an oligonucleotide probe and/or oligonucleotide primer is created so as to include the genetic polymorphism site from genetic polymorphism data in a gene for encoding a drug metabolizing enzyme or so as to include the genetic polymorphism site in an amplified fragment when the gene encoding the drug metabolizing enzyme has been amplified, and wherein at least one genetic polymorphism in a gene for encoding the target drug metabolizing enzyme is detected using the oligonucleotide probe and/or oligonucleotide primer thus obtained.

[0559] The present invention further provides methods for evaluating a drug, wherein the effectiveness and safety of a drug metabolized by the drug metabolizing enzyme are evaluated based on the results obtained by the detection method.

[0560] In some embodiments, the present invention provides a method for screening a drug, wherein the drug to be used is selected based on the results obtained in the evaluation method. In other embodiments, the present invention provides a method for screening a drug, wherein the genetic polymorphism data associated with the gene encoding a DME in a control subject is compared to the genetic polymorphism data associated with the same gene in a test subject, and wherein a drug to be used is selected from the results of an analysis of the effectiveness and/or safety of the drugs metabolized by the drug metabolizing enzyme.

TABLE 1

| | | | | |
|---|---|---|---|---|
| | | | | SEQ |
| | | | | ID |
| GENE | NO | LOCATION | SEQ. | NO. |

| | | | | | | |
|---|---|---|---|---|---|---|
| ABCB2 | 1 | 5′flanking − 673 | agctaagagtcaaagcaccc G/C ctttttccaccagcctcgcg | 1 | | |
| ABCB2 | 2 | 5′flanking − 646 | ccaccagcctcgcgtgcctg T/G tcccttcacggacactctag | 2 | | |
| ABCB2 | 3 | 5′flanking − 563 | ttgcaagcgctggctgctac A/C ggcgacctccctgcgctccc | 3 | | |
| ABCB2 | 4 | 5′flanking − 236 | gctttgcgcgcggcgctaac G/T tgtgtagggcagatctgccc | 4 | | |
| ABCB2 | 5 | Intron3 + 408 | aaggaaactgaggccaagac C/T ctaaatgctgaaactgcaca | 5 | | |
| ABCB2 | 6 | Exon4 + 153 | ccctcaccatggtcaccctg A/G tcaccctgcctctgcttttc | 6 | | |
| ABCB2 | 7 | Intron4 + 289 | gtatttctttagcatccaag G/T ggcatagctgtgtctctttc | 7 | | |
| ABCB2 | 8 | Intron4 + 291 | atttctttagcatccaaggg C/G catagctgtgtctctttctc | 8 | | |
| ABCB2 | 9 | Intron5 − 63 | ttccttcaggttaatgactg C/T ggttctttgtgtcccctcca | 9 | | |
| ABCB2 | 10 | Intron7 − 185 | gtctctgcccttgtctttgc C/T gcttcttctatctctactcc | 10 | | |
| ABCB2 | 11 | 3′flanking + 71 | agcgcacttttcagctgcgg G/A tgtctcctcttttatcatcc | 11 | | |
| ABCB2 | 12 | 3′flanking + 129 | aactgcatcaccttttccct T/C aagctttttaattcctatga | 12 | | |
| ABCB2 | 13 | 3′flanking + 459 | cattcagggaggcccaggtc G/A tgtgacgtcgacagttgctg | 13 | | |
| ABCB4 | 1 | exon3 + 3 | aacacccttattttatagat C/T caatgactgagtcaagaatt | 14 | | |
| ABCB4 | 2 | intron3 + 45 | cagcatctctacttatacca T/C gctctgctttaaggttctct | 15 | | |
| ABCB4 | 3 | intron3 + 498 | actcaaataggtggtaggag C/T agagacaattcaatacagac | 16 | | |
| ABCB4 | 4 | intron3 + 515 | gagcagagacaattcaatac A/G gacagaagtcttagatgaga | 17 | | |
| ABCB4 | 5 | intron3 + 1030 | tagttttgcaatgtagaatt G/C aaaaagtgatagatggtgtt | 18 | | |
| ABCB4 | 6 | intron6 + 1437 | gttaagcctgcttcaatcaa G/A ttagttatattcttgttcta | 19 | | |
| ABCB4 | 7 | intron6 + 2449 | ttgacttagcgacactgtta G/A catacttatctttcctgtgt | 20 | | |
| ABCB4 | 8 | intron7 + 451 | ccttgctgcacctgtgctgt A/C taagtttggcttattatagt | 21 | | |
| ABCB4 | 9 | intron7 + 530 | agtagagacaggctggcgat C/G acaccggacagagctaactg | 22 | | |
| ABCB4 | 10 | intron7 − 152 | aacagaatcatgaaattaag T/C tgttaatgatttgaaggcct | 23 | | |
| ABCB4 | 11 | exon8 + 40 | aggataaattgtttatgtcg C/T ctgggtaccatcatggccat | 24 | | |
| ABCB4 | 12 | intron8 + 130 | ctggttgactccagatatca T/C agaaggagttgtaaaattct | 25 | | |
| ABCB4 | 13 | intron8 + 248 | aatacacaggaagcttctaa A/G taaagtaaggaagtcactct | 26 | | |
| ABCB4 | 14 | intron8 + 531 | ctaaagagtgaatggattca A/G tacgtcccttggaactcacc | 27 | | |
| ABCB4 | 15 | intron8 + 4240 | ctgaggttccagcttatctc T/A tagagatgtttacttagtct | 28 | | |
| ABCB4 | 16 | intron8 + 4343 | tgttagaagaaaaaaaggtt C/T atattacaagagggtctgac | 29 | | |
| ABCB4 | 17 | intron8 + 4677 | cccaagatatcttcataact G/C tccatagtgcctagggtgcc | 30 | | |
| ABCB4 | 18 | intron9 + 113 | tttacccagattcacctatt A/G agacttcatctcaaaaaaaa | 31 | | |
| ABCB4 | 19 | intron9 + 982 | tgtcctatacagtttttgtt T/A taagtttagtaaattgatta | 32 | | |
| ABCB4 | 20 | intron11 + 457 | tccagcttgggtgacagagt A/G agacttcatctcaaaaaaaa | 33 | | |
| ABCB4 | 21 | intron11 + 1337 | tactcttggggagcctatca C/G cagggtgggtcagatatagc | 34 | | |
| ABCB4 | 22 | exon12 + 3 | tgtttcttttctgtccagat A/T ctctcggcatttagtgacaa | 35 | | |
| ABCB4 | 23 | intron12 + 1288 | cagaccacactaaccctcag T/C tggacctcaggatgtcagtg | 36 | | |
| ABCB4 | 24 | intron13 + 206 | tgtggataagaaaatagcat G/A tggttagaccatttgtgaaa | 37 | | |
| ABCB4 | 25 | intron13 + 988 | cagtcggtttggaagcttgc T/C accctttcttcacttcctca | 38 | | |
| ABCB4 | 26 | intron13 + (1413-1414) | tttatcttcacttatgtttt (T) ctcagttaagttatgctaat | 39 | | |
| ABCB4 | 26 | intron13 + (1413-1414) | tttatcttcacttatgtttt ctcagttaagttatgctaat | 40 | | |
| ABCB4 | 27 | intron13 + 1931 | cttgcaaatgttgctcttcc A/G caaaaaaaaaaggaaaggat | 41 | | |
| ABCB4 | 28 | intron23 + 784 | agtatctcctaaactcttgc T/C atgcaggaaaaattatttta | 42 | | |
| ABCB4 | 29 | intron25 + 158 | gaaatattttactgtattaa T/C gtctagaacttaaatataag | 43 | | |
| ABCB4 | 30 | intron25 + 2920 | ctgagtcttcctatacatct T/A ttccattcctcggatgctgt | 44 | | |
| ABCB4 | 31 | intron29 + 411 | cttctcttaccttgaattct A/C ggctctcgaactttgacttt | 45 | | |
| ABCB4 | 32 | intron32 + 458 | agaaaatgaaattgccctac T/C gagctaactctgaaagcaca | 46 | | |
| EPHX1 | 1 | intron1 + 110 | tgcaaaatgtgtcttactag C/T ttctagtgcataaaatattg | 47 | | |
| EPHX1 | 2 | intron1 + 143 | aaatattggtggagctcttc G/A ctgtgctgggccagtcacca | 48 | | |
| EPHX1 | 3 | intron1 + 1097 | aatccagagagggagataga T/G tggaagttcaagggtggaca | 49 | | |
| EPHX1 | 4 | intron1 + 1717 | ttccaagacagagcgagggg T/C gctgctggggcgtggtttgc | 50 | | |
| EPHX1 | 5 | intron1 + 1772 | aactcgatgctttctcctcc G/T tctgggtcctaactgcagtg | 51 | | |
| EPHX1 | 6 | intron1 + 2054 | gaaatgtaacaggcaacact A/G tggacacagaaagtagatta | 52 | | |
| EPHX1 | 7 | intron2 + 1414 | atttccaaaatctgtttggg G/T gtaactgaaacacttgggaa | 53 | | |
| EPHX1 | 8 | exon3 + 174 | taccctcacttcaagactaa G/A attgaaggtatgtttgcaaa | 54 | | |
| EPHX1 | 9 | intron3 + 6583 | ctgtcaataccatgaagggg G/C ggcgggggcactaagggtgg | 55 | | |
| EPHX1 | 10 | intron4 + 34 | agaaggttccataactgccc G/A tcctcgccaagggtgggccc | 56 | | |
| EPHX1 | 11 | intron4 + 63 | aagggtgggcccggtgttcc C/T accaggctctccttccggcg | 57 | | |
| EPHX1 | 12 | intron5 + 154 | gcagtgcctgaggcacgttg G/A cttggatcctcctgtctgta | 58 | | |
| EPHX1 | 13 | intron5 + 276 | tgctggaccaagctctggga T/C agccctgagcagaactcccc | 59 | | |
| EPHX1 | 14 | exon6 + 130 | gatgtggagctgctgtaccc C/T gtcaaggagaaggtattcta | 60 | | |
| EPHX1 | 15 | intron8 + 206 | ggtgcctggctcccgggcgg C/A cctcagtaccgctccccagt | 61 | | |
| EPHX1 | 16 | intron8 + 353 | tggccctcccagaaaagaga A/G ggccctcagtgaggggagag | 62 | | |
| EPHX1 | 17 | 3′flanking + 708 | aggtgcagactcatgcactc A/G ggccctcagtgaggggagag | 63 | | |
| EPHX2 | 1 | 5′flanking − (523-522) | aaagtcactggatatgcccc (C) tcccccgccccccaacacgg | 64 | | |
| EPHX2 | 1 | 5′flanking − (523-522) | aaagtcactggatatgcccc tcccccgccccccaacacgg | 65 | | |
| EPHX2 | 2 | 5′flanking − 522 | aaagtcactggatatgcccc T/C cccccgccccccaacacggt | 66 | | |
| EPHX2 | 3 | 5′flanking − 521 | aagtcactggatatgcccct C/T ccccgccccccaacacggtc | 67 | | |
| EPHX2 | 4 | 5′flanking − 516 | actggatatgcccctccccc G/C ccccccaacacggtcttatg | 68 | | |
| EPHX2 | 5 | 5′flanking − 515 | ctggatatgcccctcccccg C/G cccccaacacggtcttatgt | 69 | | |
| EPHX2 | 6 | Intron1 − 74 | tggctgcttctcaatgaata T/C gaacagtgtctgtttccatg | 70 | | |
| EPHX2 | 7 | Intron3 + 72 | gagcattaggtcagaatcca T/C tgaagtgagctttgagatca | 71 | | |
| EPHX2 | 8 | Intron4 + 473 | gtgtgtctctagtttaatct A/G caaaaggtgattgaatggag | 72 | | |
| EPHX2 | 9 | Intron5 + 276 | caagagtgggatgttcaagg C/T catcctgacctcacttttga | 73 | | |
| EPHX2 | 10 | Intron8 + 8 | tctgctcctcccggtgggtg T/C gctgtcttgcagctgtctta | 74 | | |
| EPHX2 | 11 | Intron9 + 1573 | atgtcgtgaagactgatgaa C/T gatggacggctgcactgctc | 75 | | |
| EPHX2 | 12 | Intron10 + 207 | gaacaggatggagatgagct T/C gtttatttgtcttttaatga | 76 | | |
| EPHX2 | 13 | Intron12 + 911 | tgaagagacctcgacatgtc G/T catcccacatactacaggga | 77 | | |
| EPHX2 | 14 | Intron12 + 2425 | atcttctcagctgagcaaac C/T gaggctcagagggcttaacc | 78 | | |
| EPHX2 | 15 | Intron12 + 2460 | ttaaccccaactggcccaag G/A ccaggtacatgattgggtca | 79 | | |
| EPHX2 | 16 | Intron12 − 281 | aagtcctttcaagagattat T/C ataagtagtaccttctcatt | 80 | | |
| EPHX2 | 17 | Intron12 − 268 | agattattataagtagtacc T/G tctcattataggaatattga | 81 | | |
| EPHX2 | 18 | Exon13 + 50 | cctgagtcggactttcaaaa G/T cctcttcagagcaagcgatg | 82 | | |
| EPHX2 | 19 | Intron13 + 1739 | ttgtcgtaacagggttttca G/T atgagcatatttcctttgta | 83 | | |
| EPHX2 | 20 | Exon14 + 33 | atgcataaagtctgtgaagc G/A ggtaagagacatgcttggga | 84 | | |
| EPHX2 | 21 | Intron14 + 314 | ggattgagagcttacctcta T/C gggggtcacctcgtgtatgc | 85 | | |
| EPHX2 | 22 | Intron14 + 878 | attcccttattccttcacac C/T gtctgtcactcattcattca | 86 | | |
| EPHX2 | 23 | Intron14 + 948 | gcacaggctgggtatgaagc T/C ggggctgcatgctcagctac | 87 | | |
| EPHX2 | 24 | Intron15 + 259 | agagggttttcactactttt C/T agtcatggctcctcagagaa | 88 | | |
| EPHX2 | 25 | Intron16 + 459 | tcctcatttgtcaagcagaa G/C atgagtttccaatctctggg | 89 | | |
| EPHX2 | 26 | Intron16 + 645 | gtaagtgaacacactgctac G/A atgaaaatgaccaaactgca | 90 | | |
| EPHX2 | 27 | Intron16 + 985 | gtcattatcatcatatgacc G/A atgaaaatgaccaaactgca | 91 | | |
| EPHX2 | 28 | 3′flanking + 12 | aggtggccttacacacatct T/C gcatggatggcagcattgtt | 92 | | |
| EPHX2 | 29 | 3′flanking + 374 | tgttcacggagaatgcacgg C/T atggggatgaaccctttccc | 93 | | |
| EPHX2 | 30 | 3′flanking + 544 | tagccacctgcctttctccc G/A gcttccctagcagagtttgc | 94 | | |
| GAMT | 1 | intron1 + 429 | ctcggaaagctgagctcagg G/A agacagctgtccccggggtg | 95 | | |
| GAMT | 2 | 3′flanking +626 | cactgacctccttgccctga G/A agaaggccggctcctgtgct | 96 | | |
| NNMT | 1 | 5′flanking − 228 | ataattttcctgacgagctc A/T agtgctcccctctggtctaca | 97 | | |
| NNMT | 2 | intron1 + 44 | ccccactaatgtgagtcata T/C agatggagtctcagggcacg | 98 | | |
| NNMT | 3 | intron1 + 149 | ggataaaaaacgaatattggt A/G tagcgattccacagtttaca | 99 | | |
| NNMT | 4 | intron2 + 158 | agataggcccatgtgtgtgc G/A tgttagtaaatttgtgtatg | 100 | | |
| NNMT | 5 | intron2 + 433 | gctgtagccatccaagccta T/C agaacttggctgtgagtgtg | 101 | | |
| NNMT | 6 | intron2 − 3064 | atcatctgactggtaagttc C/T agttctgtggtaactcaagt | 102 | | |
| NNMT | 7 | intron2 − 260 | atttcatggagggaagtcca T/C ggtagaagcaggctgctagg | 103 | | |
| NNMT | 8 | 3′flanking + 71 | ggctcagtggttggggccca A/G tggttcatctaggacgggac | 104 | | |
| PNMT | 1 | 5′flanking − 390 | aagaggtgaatggctgcggg G/A ggctggagaagagagatggg | 105 | | |
| PEMT | 1 | exon2 − 4 | agctcagcagacctcctggc C/T gtggtgggtagctcctttcc | 106 | | |
| PEMT | 2 | intron4 + 39 | actgtccagacgggagtatc C/T cactgcttggtgagccccac | 107 | | |
| PEMT | 3 | intron4 + 1317 | accgtccccagctggcccca G/A cctcctgacatgggcctctg | 108 | | |
| PEMT | 4 | intron4 + 1355 | ctggagccaggctgcagccg A/C agtgcctggccatcctggcg | 109 | | |
| PEMT | 5 | intron4 + 5925 | gtccaggcactgtggcccta C/T gtgggagtctccagtctcca | 110 | | |
| PEMT | 6 | intron4 + 6028 | ggcagtggtccaaggaccag G/C atggactccctcttctcacc | 111 | | |
| PEMT | 7 | intron4 + 6078 | atctgtaccctcgcggactc C/T acctggcttcgtgccatcac | 112 | | |
| PEMT | 8 | intron4 + 6089 | cgcggactctacctggcttc A/G tgccatcacccccgccagat | 113 | | |
| PEMT | 9 | intron4 + 6379 | tcaggtgtcccctccctcat G/A cctcctcaccctgccctctc | 114 | | |
| PEMT | 10 | intron4 + 7339 | tgtaaggaatcctgccaaga C/T ggcagatgcacacggggtca | 115 | | |
| PEMT | 11 | intron4 + 7619 | ctcctgcacatgtgctccag A/G gaggaaaggcatttgacagg | 116 | | |
| PEMT | 12 | intron4 + 8858 | ggcatgtgtgtgtgtgtgta T/G gtgtgtgagtgtgtgcatgt | 117 | | |
| PEMT | 13 | intron4 + 9029 | tttctggaccagaaagcgtc G/A tcctctgccagggcctcttg | 118 | | |
| PEMT | 14 | intron4 + 9056 | gccagggcctcttgcacttg C/T gggaaagctgagctgagctg | 119 | | |
| PEMT | 15 | intron4 + 9512 | ctgagctgggcagcagcatt A/G ctctgtgtgctgctggcact | 120 | | |
| PEMT | 16 | intron4 + 9523 | agcagcattactctgtgtgc T/C gctggcactggcctggtggg | 121 | | |
| PEMT | 17 | intron4 + 9622 | gacaaagtgtacaacaaggt G/A tctcgaactgggtcagctca | 122 | | |
| PEMT | 18 | intron4 + 10776 | ccattcctgggtcttctttg G/A aggctgaatgaaattccatg | 123 | | |
| PEMT | 19 | intron4 + 10912 | tctgccccactttgctcaga G/C gtgcaacaaggccttcagga | 124 | | |
| PEMT | 20 | intron4 + 11590 | ggacactggcctgatgcaga G/C gtgtggtctctctcctgcag | 125 | | |
| PEMT | 21 | intron4 + 12090 | ggccagggcacccctaccag G/C ctgagtcccacctgtccagc | 126 | | |
| PEMT | 22 | intron4 + 12263 | tacccgccttcccagatgga G/A cgggctgctcatgggactta | 127 | | |
| PEMT | 23 | intron4 + 12448 | tctggtcccctctcctgctt G/A tagtttcctgggctaaaatc | 128 | | |
| PEMT | 24 | intron4 + 12730 | tgggaccagtgccgccacca C/T ggcccaaggacctggtgttc | 129 | | |
| PEMT | 25 | intron4 + 13240 | gggctccaggcacacagcgg T/C cccagtacacctgtcgcttt | 130 | | |
| PEMT | 26 | intron4 + 13494 | tccgtggaactcagagatgg T/C acctccctgcgaggtggggc | 131 | | |
| PEMT | 27 | intron4 + 13817 | aactctcccctgctgctgag A/G cagatcttggagcctcggcc | 132 | | |
| PEMT | 28 | intron4 + 14773 | ccgccctgtgcttcatgccc C/T ctatgcctctcactgcctgg | 133 | | |
| PEMT | 29 | intron4 + 14951 | gtcctgaggcccctcccacc G/A gagcctggggtgccgtcaca | 134 | | |
| PEMT | 30 | intron4 + 16896 | gctgtgactgtcttggagac T/C gggtcttggcgggcctggtg | 135 | | |
| PEMT | 31 | intron4 + 19439 | ccaggagcctctgaggcagc G/A ggggcttctcaaccacacag | 136 | | |
| PEMT | 32 | intron4 + 19559 | attttgtcagcatgtcacgt C/T cctttcataatgaagcaagg | 137 | | |
| PEMT | 33 | intron4 + 20051 | acagcactgcgggagccacg A/G catctgcagacgcatttgat | 138 | | |
| PEMT | 34 | intron4 + 20816 | tggactctctggcgtccatc C/T agccacttcagtgcgacgtg | 139 | | |
| PEMT | 35 | intron4 + 21196 | ggctggctgggccctgggat C/G atcgtgacaggctttagtgg | 140 | | |
| PEMT | 36 | intron4 + 21528 | acaggtgggagccgaggctc G/T ggaggtgggccgggctgagc | 141 | | |
| PEMT | 37 | intron4 + 21596 | ccgcttccccgtgctctggc C/T gtagcagaaagtgtcccact | 142 | | |
| PEMT | 38 | intron4 + 22672 | agcctcccactgccttgtgg C/T tgaggggagggggccgggtc | 143 | | |
| PEMT | 39 | intron4 + 22713 | tctaacgctgtcttctttgt A/T ctgaaaaccaaacaccttct | 144 | | |
| PEMT | 40 | intron4 + 23010 | tgccgggcagcggggaggga G/A ggcgagtggttcccccaagt | 145 | | |
| PEMT | 41 | intron4 + 23588 | gtgcaggcgccctgcatccc C/T gcagccaagttctgggcgga | 146 | | |
| PEMT | 42 | intron4 + 23627 | gacactgccctgagccagga C/T ggtgaggtgggacgccttcc | 147 | | |
| PEMT | 43 | intron4 + 23941 | tgaggggttgggactctaca G/A aggagagtggactcacgggg | 148 | | |
| PEMT | 44 | intron4 + 24091 | gacacctcttcactgtcagc G/T ctgagacacgcccctgccct | 149 | | |
| PEMT | 45 | intron4 + 25348 | caggccagttggaatcctac G/A tagagtgaaagcatctcagc | 150 | | |
| PEMT | 46 | intron4 + 25603 | taagcagttaacactgatgc G/A tgatgaaaattccaacagca | 151 | | |
| PEMT | 47 | intron4 + 31540 | cctccaggtggcaggaacac T/C gtgaggagcatgcaacgtgc | 152 | | |
| PEMT | 48 | intron4 + 31637 | gtgggctgggacgccaggac G/A gtgaggggcttcaaggtgtg | 153 | | |
| PEMT | 49 | intron4 + 31642 | ctgggacgccaggacggtga G/A gggcttcaaggtgtgtttgt | 154 | | |
| PEMT | 50 | intron4 + 35593 | ggaggagctgaaagagctgg G/A gctcgggatcaggtggttca | 155 | | |
| PEMT | 51 | intron4 + 35647 | actttgaggcaccaccgcac C/A tgtccgtgcgtgagggagac | 156 | | |
| PEMT | 52 | intron4 + 35862 | tcccagtggtggctctgtcc C/T cgtctcagccgagcactcag | 157 | | |
| PEMT | 53 | intron4 + 35882 | ccgtctcagccgagcactca T/G cggccagggtggctggactc | 158 | | |
| PEMT | 54 | intron4 + 37141 | ccacaggccggatgccttga T/G acttctcagctgcagggctg | 159 | | |
| PEMT | 55 | intron4 + 38862 | tggagagaccacctcagaca C/G caaggacgggcatgccatgg | 160 | | |
| PEMT | 56 | intron4 + 38872 | acctcagacagcaaggacgg G/T catgccatgggtcccggcag | 161 | | |
| PEMT | 57 | intron4 + 39140 | atgtctcaaatctccctccc C/T gggaaatctaggcacaggtc | 162 | | |
| PEMT | 58 | intron4 + 39635 | caggcccaggagcaggtggg G/T cctcctcacaggagcagggc | 163 | | |
| PEMT | 59 | intron4 + 39713 | actctgagcatgctggctcc C/T tccttctttccagggcagca | 164 | | |
| PEMT | 60 | intron4 + 40436 | cctggttgtgcttcggaccc G/A gaggcagacagaggaggcct | 165 | | |
| PEMT | 61 | intron4 + 47485 | acaatgactgttggagccct C/T gagcaggctgtgtcacgtgg | 166 | | |
| PEMT | 62 | intron4 + 48131 | actgggggatcctgaatccc G/A cctcctgatgccagtggagc | 167 | | |
| PEMT | 63 | intron4 + 48558 | cacagtgtgaactgttaggc C/G acagccacatcttgccggag | 168 | | |
| PEMT | 64 | intron4 + 48702 | gagatgggggcggttcggga G/A gcaaaagcaggaaggcagaa | 169 | | |
| PEMT | 65 | intron4 + 50302 | gcatgtgcatgggcagaggc T/C gttcccatctgagtgggacc | 170 | | |
| PEMT | 66 | intron4 + 54102 | ggccgcgtgctcctgcagcc A/T tgggctcctctggcagttct | 171 | | |
| PEMT | 67 | intron4 + 54220 | cccagggacagatcttctcc G/A ccagacgtctctttctgcct | 172 | | |
| PEMT | 68 | intron4 + 54371 | gcagataatgtgcagctggg G/A tgcatgtggttgttgctccc | 173 | | |
| PEMT | 69 | exon5 + 79 | tggcctgctactctctaagc G/C tcaccatcctgctcctgaac | 174 | | |
| PEMT | 70 | intron5 − 6796 | ggaggaagtcagcttcttac A/C gatggtggctcccagctttc | 175 | | |
| PEMT | 71 | intron5 − 6636 | ttttctcctctcaccttttg T/G gttcagaggcagaggtgtgc | 176 | | |
| PEMT | 72 | intron5 − 6448 | gttgggccaggctctgacag G/A accctcgggaccagctcctg | 177 | | |
| PEMT | 73 | intron5 − 5218 | ggagccctggctgaagaagc C/G ttacgaccaaggcctggagg | 178 | | |
| PEMT | 74 | intron5 − 4824 | ggacaggccgggggttgagc G/A gctgcatgaaggagggaggg | 179 | | |
| PEMT | 75 | intron5 − 4249 | tcaccagagtgatttcctcg C/A ggcaggtgcctggggtagcc | 180 | | |
| PEMT | 76 | intron5 − 4230 | gaggcaggtgcctggggtag C/T cactgggcggggtccatgag | 181 | | |
| PEMT | 77 | intron5 − 4182 | ggagagtaaggggtgggggg G/A cacttaggacagggaagctg | 182 | | |
| PEMT | 78 | intron5 − 3369 | ccaggtggggccgtgtgcct G/C tggcctggtgtgtggcccag | 183 | | |
| PEMT | 79 | intron5 − 2625 | cagggaagctgggccctgaa C/T gagctgggcttttgggccac | 184 | | |
| PEMT | 80 | intron5 − 1200 | attattgtgagcatgggaag A/T gcacatttggtcacacatgt | 185 | | |
| PEMT | 81 | intron6 + 606 | gcctggctagacgcccacca A/G tgaccctgatgatggcagca | 186 | | |
| PEMT | 82 | intron6 + 1229 | tttggtccaggaagggggac G/A gcagccaggagcgtctggat | 187 | | |
| PEMT | 83 | intron7 + 716 | atggagatgtgctcccccgg C/G gggtcagaggacctgcggtc | 188 | | |
| PEMT | 84 | intron7 + 1537 | ctctgggggacgcataagcc G/A cctccagaggacatcagcca | 189 | | |
| PEMT | 85 | intron7 + 1718 | gggcttccaggtgtctgagc T/C ccccggcatgtaggacccca | 190 | | |
| PEMT | 86 | intron7 + 2695 | ggctttgggggaccctggac C/T catttctagaaaacagcctt | 191 | | |
| PEMT | 87 | intron8 + 140 | ccagggctcccaggtcagag C/T ggccatggtagcttacaatg | 192 | | |
| PEMT | 88 | 3′flanking + 178 | tacttaggaggcgtcagggg C/T tcacctggccatggccatgg | 193 | | |
| PEMT | 89 | 3′flanking + 394 | gatgacactgtcattcctaa A/G tgaatggccttgtgctgacc | 194 | | |
| GSTM3 | 1 | 5′flanking − 144 | ccaacgccggcattagtcgc G/T cctgcgcacggccctgtgga | 195 | | |
| ALDH5 | 1 | 5′flanking − 2808 | cgttgcactgtaggactctc C/T ccacgtcccctaatcccatc | 196 | | |
| ALDH5 | 2 | 5′flanking − 2575 | gcagttcccgcggatagaga A/G ggtccggtccttcccgctgt | 197 | | |
| ALDH5 | 3 | 5′flanking − 2537 | tgtgggtgaactgtaaaaaa C/T tgcctgtattcaggaggata | 198 | | |
| ALDH5 | 4 | 5′flanking − 940 | cttcaactaatctgggaaca C/T tacactctgtttaattttca | 199 | | |
| ALDH5 | 5 | 5′flanking − 785 | tgggaaagctgaaaagggat G/T ctgagacctgtggttggggg | 200 | | |
| ALDH5 | 6 | exon1 + 183 | ccgacggtcaaccctaccac T/C ggggaggtcattgggcacgt | 201 | | |
| ALDH5 | 7 | exon1 + 257 | cgtgaaagcagcccgggaag C/T cttccgcctgggtcccccat | 202 | | |
| ALDH5 | 8 | exon1 + 320 | gcggggccggctgctgaacc G/T cctggcagacctagtggagc | 203 | | |
| ALDH5 | 9 | exon1 + 605 | acttgccccggcactcgcca C/T aggcaacactgtggttatga | 204 | | |
| ALDH5 | 10 | 3′flanking + 1527 | aaagtgcaactgtaagaccc G/A tagagaaaaactctggttcc | 205 | | |
| TGM1 | 1 | Exon2 + 179 | tgccgaaatgcggcagatga C/T gactggggacctgaaccctc | 206 | | |
| TGM1 | 2 | Intron9 − 611 | acttaccactctgtcctctc C/T tgccaggcctcttcctgtca | 207 | | |
| TGM1 | 3 | Intron9 − 272 | ccgcacatctgtaccctgcc C/G ccatcctccagcagagcagc | 208 | | |
| TGM1 | 4 | Intron10 + 54 | tcagtcatgggttctctggt C/T ccaacttcaccgctgactga | 209 | | |
| TGM1 | 5 | Intron10 − 51 | aggaggccgggagtcaggcc A/G ccctcagaccctctggctca | 210 | | |
| TGM1 | 6 | Intron12 − 47 | gggagtccctgggggaagcc T/G catgtagggaagcaggcctc | 211 | | |
| TGM1 | 7 | Intron13 + 72 | ggataaggacatcagaggtg G/A gcgctaagccagcagcaggc | 212 | | |
| TGM1 | 8 | Intron14 + 1671 | atctcttacccacaccccca C/G catggtggggaggttcctca | 213 | | |
| TGM1 | 9 | Intron14 + 1691 | ccatggtggggaggttcctc G/A tcctaagggatccgcagagc | 214 | | |
| TGM1 | 10 | Intron14 − 1634 | tccctgcctccctccttcag G/A gagctcagaaacaccttcaa | 215 | | |
| TGM1 | 11 | Intron14 − 1459 | ggaaacccctcagaaccagg T/C tccaagccaaatgctttgcc | 216 | | |
| TGM1 | 12 | Intron14 − 801 | cagaatacaaaagtgggatg G/C gaggcaaggagtcccgttag | 217 | | |
| TGM1 | 13 | Exon15 + 233 | ctcgaggtggagcttagccc T/C gtgccaggagcaatgggact | 218 | | |
| TGM1 | 14 | Exon15 + 369 | ggagtcagtcttcacttgca C/A tgggggaacagatgctaata | 219 | | |
| GGT1 | 1 | intron1 + 85 | ttatccagtaaggtggctcc G/A tcacctcttttcctggtggg | 220 | | |
| GGT1 | 2 | exon3 + 68 | gacggccaggtccggatggt G/T gtgggagctgctgggggcac | 221 | | |
| NQO1 | 1 | 1 intron 1 80 | aggaggttgtaggggcttgg C/A ctgaattttgttccttgact | 222 | | |
| PIG3 | 1 | 5′flanking region − 47 | gggaaggaggaaaggaaaga G/A ggggagggtggttctgctta | 223 | | |
| PIG3 | 2 | intron 2 243 | taacaccggacgcccagcag A/C agtcccagcttcttagaatc | 224 | | |
| PIG3 | 3 | 3′flanking region 282 | agcaggccccagccctgccc G/A ctactcacctgggccccacc | 225 | | |
| NQO2 | 1 | 5′flanking region-434 | tttctgttgcaccacggacc C/G tcattctgtaaccgggatac | 226 | | |
| NQO2 | 2 | 5′flanking region-406 | gtaaccgggataccagccag A/G gatggggagcgggaggcgca | 227 | | |
| NQO2 | 3 | 5′untranslated region-102 | tcctgcggctcctactgggg A/C gtgcgctggtcggaaggtga | 228 | | |
| NQO2 | 4 | intron 1 1919 | tcactcaaatagagctgagt T/C agtcactcagctcttggacc | 229 | | |
| NQO2 | 5 | intron 1 2004 | acaaactcacatgccaccag C/G catatgatgtaaacatgtaa | 230 | | |
| NQO2 | 6 | intron 1 3391 | aaagcagagggctgtgcagg C/T gcccctgcccctaggctagg | 231 | | |
| NQO2 | 7 | intron 1 3456 | caaaggcctcatcctcaggg C/A ggccaactcttctgttttag | 232 | | |
| NQO2 | 8 | intron 1 3595 | actgcccagctttaggttca T/C tcttgtaagtgttgctggtg | 233 | | |
| NQO2 | 9 | intron 1 3596 | ctgcccagctttaggttcat T/C cttgtaagtgttgctggtgt | 234 | | |
| NQO2 | 10 | intron 1 3598 | gcccagctttaggttcattc T/C tgtaagtgttgctggtgtca | 235 | | |
| NQO2 | 11 | intron 1 3651 | ccctgcgctttgaagggatg A/G atgtgacctctcccacattc | 236 | | |
| NQO2 | 12 | intron 1 6036 | tggtgtggcggttcactgat C/T ccccagccttctgctcgatc | 237 | | |
| NQO2 | 13 | intron 2 14 | atggcaggtaatgattcact A/G ttgtggagtaagactttttt | 238 | | |
| NQO2 | 14 | intron 2 192 | gccacgtggaagtgtataaa C/T tatctggaattatcttgttt | 239 | | |
| NQO2 | 15 | intron 2 635 | caccctgtttagcacctagc A/C ccatccctggcctctgccca | 240 | | |
| NQO2 | 16 | intron 2 685 | agtagcaccccctccccacc G/A gctgtgacaaaccaaaatgt | 241 | | |
| NQO2 | 17 | exon 3 139 | ctgatttgtatgccatgaac T/C ttgagccgagggccacagac | 242 | | |
| NQO2 | 18 | intron 3 36 | aatgctctatttataaaaac T/C atctttatgttttttacttt | 243 | | |
| NQO2 | 19 | intron 3 728 | aacgtgggcataaaccacca T/C ctagtgcaaaaaaagcggtg | 244 | | |
| NQO2 | 20 | intron 4 1577 | tgcctctgcacaccccttcc C/T gacaccagccctttctttac | 245 | | |
| NQO2 | 21 | intron 4 1832 | tcggccggccacgtggagcc C/T gctttcctcctcgcacccac | 246 | | |
| NQO2 | 22 | intron 4 2583 | tggtgttacgcacagctcct C/T gtcccctccctgcctgccca | 247 | | |
| NQO2 | 23 | exon 5 330 | ctgtactggttcagcgtgcc A/G gccatcctgaagggctggat | 248 | | |
| NQO2 | 24 | exon 5 405 | atcccaggattctacgattc C/T ggtttgctccaggtatgtgc | 249 | | |
| NQO2 | 25 | intron 5 21 | gtatgtgctcttggataagg A/T tcactatggatagttggagg | 250 | | |
| NQO2 | 26 | intron 5 253 | atggcaaacaagggagtggg T/C caggtgtcaggtgacggggg | 251 | | |
| NQO2 | 27 | intron 6 2435 | ccccccttaaatcatttaac T/C gaatggtatgtaacaggtgt | 252 | | |
| SULT1A1 | 1 | 5′flanking region − 1597 | gcagagtaaagggactcact C/G aagaagaggaacgtgggggt | 253 | | |
| SULT1A1 | 2 | 5′flanking region − 1491 | gaggggtatattcatgaaga G/T tccaggaaaaggtaaagatt | 254 | | |
| SULT1A1 | 3 | 5′flanking region − 1376 | cggtttcatatgttactgat C/T atacaatgagatcctaggtg | 255 | | |
| SULT1A1 | 4 | 5′flanking region − 1375 | ggtttcatatgttactgatc A/G tacaatgagatcctaggtga | 256 | | |
| SULT1A1 | 5 | 5′flanking region − 1370 | catatgttactgatcataca A/G tgagatcctaggtgaaacct | 257 | | |
| SULT1A1 | 6 | exon 1B − 65 | aaccctgcattccccacaca G/A cacccacaatcagccactgc | 258 | | |
| SULT1A1 | 7 | intron 1B 442 | gagccaccctgcctaggcct G/A tgcttttgctgagtcatcag | 259 | | |
| SULT1A1 | 8 | exon 1A − 197 | gctgggggtcccagcaggaa A/G tggtgagacaaagggcgctg | 260 | | |
| SULT1A1 | 9 | exon 1A − 159 | ctggctggcagggagacagc A/C caggaaggtcctagagcttc | 261 | | |
| SULT1A1 | 10 | exon 1A − 95 | gagaccttcacacaccctga C/T gccactgactggctttgtga | 262 | | |
| SULT1A1 | 11 | intron 1A 60 | ctggttttcagccccagccc C/T gccactgactggctttgtga | 263 | | |
| SULT1A1 | 12 | intron 1A 69 | agccccagccccgccactga C/G tggctttgtgagtgcgggca | 264 | | |
| SULT1A1 | 13 | intron 1A 174 | tgtgatggtggtaagggaac G/A ggcctggctctggcccctga | 265 | | |
| SULT1A1 | 14 | intron 6 11 | catgaaggaggtgagaccac C/G tgggaagcttccctccatgt | 266 | | |
| SULT1A1 | 15 | intron 6 17 | ggaggtgagaccacctgtga A/T gcttccctccatgtgacacc | 267 | | |
| SULT1A1 | 16 | intron 6 35 | gaagcttccctccatgtgac A/T cctgggggccggcacctcac | 268 | | |
| SULT1A1 | 17 | intron 6 71 | ctcacagggacccaccaggg T/C cacccagccccctcccttgg | 269 | | |
| SULT1A1 | 18 | intron 8 108 | ttggcagcccccacagcagg C/A ccggattccccatcctgcct | 270 | | |
| SULT1A1 | 19 | intron 6 111 | gcagcccccacagcaggccc G/A gattccccatcctgccttct | 271 | | |
| SULT1A1 | 20 | intron 6 270 | ctccctgccaaagggtgtgc C/T acccagggccacagtcatgg | 272 | | |
| SULT1A1 | 21 | intron 6 488 | ttttacttttcctgaatcag C/T aatccgagcctccactgagg | 273 | | |
| SULT1A1 | 22 | intron 6 509 | aatccgagcctccactgagg A/G gccctctgctgctcagaacc | 274 | | |
| SULT1A1 | 23 | exon 7 600 | ccctctgctgctcagaaccc C/G aaaagggagattcaaaagat | 275 | | |
| SULT1A1 | 24 | exon 7 645 | gagtttgtggggcactccct G/A ccagaggagaccgtggactt | 276 | | |
| SULT1A1 | 25 | exon 8 902 | gctgtgagaggggctcctgg G/A gtcactgcagagggagtgtg | 277 | | |
| SULT1A2 | 1 | 5′flanking region − 547 | tgttctttcttggttctatg G/C atccatgctctgctccaccc | 278 | | |
| SULT1A2 | 2 | 5′flanking region − 425 | tgtgggttgcactgggccag G/A acccctggcaccttcaagac | 279 | | |
| SULT1A2 | 3 | 5′flanking region − 358 | ctttccagggcctgcctatc C/T cagctttctccttcttgcct | 280 | | |
| SULT1A2 | 4 | 5′flanking region − 355 | tccagggcctgcctatccca G/T ctttctccttcttgcctggg | 281 | | |
| SULT1A2 | 5 | 5′untranslated region − 28 | actgcagggcgaggagggcac A/G aggccaggttcccaagagct | 282 | | |
| SULT1A2 | 6 | intron 1A 85 | ctgactggccttgtgagtgc G/A ggcaagtcactcagcctccc | 283 | | |
| SULT1A2 | 7 | exon 2 24 | gagctgatccaggacatctc T/C cgcccgccactggagtacgt | 284 | | |
| SULT1A2 | 8 | intron 2 34 | gccacccaccctctcccagg T/C ggcagtccccaccttggcca | 285 | | |
| SULT1A2 | 9 | intron 5 77 | cagcaaccctgtgtcggcac T/C ccctgcccgcttctccagtg | 286 | | |
| SULT1A2 | 10 | intron 6 684 | actggggtcccaggggtcga G/C gagctggctctatgggtttt | 287 | | |
| SULT1A2 | 11 | 3′untranslated region 895 | gctctgagctgtgagagggg T/C tcctggagtcactgcagagg | 288 | | |
| SULT1A2 | 12 | 3′flanking region 98 | cctccccgctccagctcctc A/T acttgccctgtttggagagg | 289 | | |
| SULT1A2 | 13 | 3′flanking region 817 | ccactgactcggggcttgcc A/C aggctgccagggctggcaaa | 290 | | |
| SULT1A2 | 14 | 3′flanking region 1006 | cctctcccctggaggctgct T/C tacccgctgtgggggcgcat | 291 | | |
| SULT1A2 | 15 | 3′flanking region 1464 | tcccgtagcccaggcaagtt C/T ggtgaccagagagcagcccc | 292 | | |
| SULTX3 | 1 | intron 1 332 | cctgcttctccctttacctg G/T ctggctgtgtgaccttggac | 293 | | |
| SULTX3 | 2 | intron 1 1167 | taggaatggctaagcgtgtc G/A ttggcttctgtggccactca | 294 | | |
| SULTX3 | 3 | intron 1 2872 | cattctcactgatgcagacg G/A aagcttctgggcctgggcgt | 295 | | |
| SULTX3 | 4 | intron 1 6242 | cacccttggcttttaccagc A/G tggaaacattttacctgaat | 296 | | |
| SULTX3 | 5 | intron 1 6601 | gcgtgggcttctggagggag C/T gagaggagagtggagggccc | 297 | | |
| SULTX3 | 6 | intron 1 6768 | agcttgaaatgagccagact C/T tcctgggacctgttgacccc | 298 | | |
| SULTX3 | 7 | intron 1 6905 | agtactttgttttatcctcc C/T catcctcacaactttgccat | 299 | | |
| SULTX3 | 8 | intron 1 7464 | gccaggatcccttgagagac G/A acatgaacacagccaggagc | 300 | | |
| SULTX3 | 9 | intron 1 7833 | tgcttcgggctgggcttggc G/A ggggcagctgtgctccaggc | 301 | | |
| SULTX3 | 10 | intron 1 8189 | caaactggggcccttaatgc C/T gcacaccagagcctcctttc | 302 | | |
| SULTX3 | 11 | intron 1 8316 | ctctcacacaagggcggagc C/G tcttccccttgaggcagagc | 303 | | |
| SULTX3 | 12 | intron 1 8617 | agacagaggctggggccaag C/T cagggttgccggagcttcct | 304 | | |
| SULTX3 | 13 | intron 1 8631 | gccaagccagggttgccgga G/T cttcctggactggtcaggcc | 305 | | |
| SULTX3 | 14 | intron 1 9493 | ttttcctcttagagcttccc G/A tcgtgctctgtgtcgagggc | 306 | | |
| SULTX3 | 15 | intron 1 10306 | caggcggggagcctgaatgc C/T gcagtcgtgagggtggccag | 307 | | |
| SULTX3 | 16 | intron 1 11987 | tcataaaataatgatatcag T/C acactttttggaaatttgag | 308 | | |
| SULTX3 | 17 | intron 1 13085 | ctctgtgcccggtgttgaga C/A aggccatgccctagagtcct | 309 | | |
| SULTX3 | 18 | intron 1 13108 | gccatgccctagagtcctgg G/A gagttccaccccagaacagc | 310 | | |
| SULTX3 | 19 | intron 2 700 | gaaccatctgggagtcgttc C/T gtactgccgtgccgagggcc | 311 | | |
| SULTX3 | 20 | intron 2 818 | agccatagtagctagccagc G/A atcagcgctgggaggggagc | 312 | | |
| SULTX3 | 21 | intron 2 1677 | actccacttcccctgaaccc C/T accccttccttcctcctctg | 313 | | |
| SULTX3 | 22 | intron 4 4954 | gcgtgccgaaggcgggaggg C/T tgggatggctcaagacgtga | 314 | | |
| SULTX3 | 23 | intron 5 3632 | ccagctgactcccacaccag C/T ggtcagagaacattgtcttt | 315 | | |
| SULTX3 | 24 | intron 5 3662 | acattgtcttttaaggtttc C/T gaagtgctgcaataaagaaa | 316 | | |
| SULTX3 | 25 | intron 6 1874 | tctgatctcagagagctgac A/G atggaaagaattctaaacga | 317 | | |
| SULTX3 | 26 | intron 6 2133 | agaccggtgcctgcagttta T/G cccacagctcagccctccct | 318 | | |
| SULTX3 | 27 | intron 6 2524 | ggaagggccagggctgcctg T/C gatgcccagagcagtgcact | 319 | | |
| SULTX3 | 28 | intron 6 2573 | agatcatactcgctcctggg A/G tgtttattaaacacctgcca | 320 | | |
| SULTX3 | 29 | 3′flanking region 12 | gttcccggcgttgcgtcgag C/G gtttctgcttgtgggggtag | 321 | | |
| SULTX3 | 30 | 3′flanking region 445 | tccaaagcctgtcttcctga T/G ttcctgtggaaggagagtcc | 322 | | |
| TPST1 | 1 | 5+ flanking region − 298 | acccgccaccatgcccagct A/C attttttttgtatttttttt | 323 | | |
| TPST1 | 2 | intron 1 3520 | agaaaagcagattaatgtaa C/G agtgacgcttagacaacaag | 324 | | |
| TPST1 | 3 | intron 1 3610 | ggcagaaagagaatatagca A/G ctattaaacacaaataaatt | 325 | | |
| TPST1 | 4 | intron 1 20828 | tattgctgtccacctggtca A/G tgtgtcctgctgataagtgc | 326 | | |
| TPST1 | 5 | intron 1 − 6761 | aatacaatacttattctgta T/C aattctagagggcccagaga | 327 | | |
| TPST1 | 6 | intron 1 − 544 | tagaacaagtgaatatttta G/T gttcttagtggtttatggtt | 328 | | |
| TPST1 | 7 | intron 1 − 526 | tacgttcttagtggtttatg G/T ttggcagttttcccccaaca | 329 | | |
| TPST1 | 8 | intron 1 − 234 | tcaagacatttaataatgca C/T atgtttcagctaaccctttt | 330 | | |
| TPST1 | 9 | intron 1 − 48 | ttatagtgggtttaagcatg A/G tttctaaaaaatttaaataa | 331 | | |
| TPST1 | 10 | intron 2 − 18944 | aaaacattagaactgggaag G/A ttaaaaaatctttagtcttt | 332 | | |
| TPST1 | 11 | intron 2 − 18687 | tatgtgcaccctaataacat A/G tttccttaaaactagtacta | 333 | | |
| TPST1 | 12 | intron 2 − 18501 | ttggaaggtaacttaatgta A/G gtgcctgaaaaacagggata | 334 | | |
| TPST1 | 13 | intron 2 − 159 | gaatggggatttccctcagt C/G ctgcccactggctgctcttg | 335 | | |
| TPST1 | 14 | intron 2 − 19 | acctgttgccttaaactcac G/A cctgctttgtttttccaggt | 336 | | |
| TPST1 | 15 | intron 2 158 | tgctggggaagaaagatcag C/G gtctgggacttgttgatttt | 337 | | |
| TPST1 | 16 | intron 2 3779 | agcagggcacgtcaccctcc G/T ggcacacccatgtgttcacc | 338 | | |
| TPST1 | 17 | intron 2 292 | ttgttattttcattatgaac C/T atgaaatatttcagctgaaa | 339 | | |
| TPST1 | 18 | 3′untranslated region 1518 | gttgtctgtacatgttctaa T/G gttttgtagaacacgtgtgc | 340 | | |
| TPST1 | 19 | 3′flanking region 264 | acggtgcttggcctgcatta C/T cattttgtagtgaagtttct | 341 | | |
| TPST2 | 1 | intron 2 578 | tcacctatcatcctcactgc G/A aggatgccaggatacctccc | 342 | | |
| TPST2 | 2 | intron 2 789 | cttaagccatcgtgcaggtc A/G ttgctgtcttctgctcactt | 343 | | |
| TPST2 | 3 | intron 3 2009 | cccaggctggagtgtagtgg T/C gtgatctcggctcactgcaa | 344 | | |
| TPST2 | 4 | intron 3 2017 | ggagtgtagtggtgtgatct C/T ggctcactgcaacctccgcc | 345 | | |
| TPST2 | 5 | intron 3 2035 | ctcggctcactgcaacctcc G/A cctcccgggttcaagcagtt | 346 | | |
| TPST2 | 6 | intron 4 104 | aatgttcagtctctcaattc C/T tggtcatctgatttgttcct | 347 | | |
| TPST2 | 7 | intron 4 379 | tacatacctaccctattggt C/T cctttcttgtcttataaggt | 348 | | |
| TPST2 | 8 | intron 4 588 | tactgcagcctgatacttct G/T ggcttaagccatcctctcac | 349 | | |
| TPST2 | 9 | intron 4 626 | caccccaggctcctgagtag C/T taggactgcaggtgcacgcc | 350 | | |
| TPST2 | 10 | intron 4 718 | cccaggctggtctagaactc C/G tggccgtacgggatgcccct | 351 | | |
| TPST2 | 11 | intron 4 873 | gttgatggccttatttatac G/A tttccattacagcttctagt | 352 | | |
| TPST2 | 12 | intron 4 949 | caaatatttgaaaatgggac C/G caggcctgaggaagagcttt | 353 | | |
| TPST2 | 13 | intron 4 1033 | taagctcagcatttctgagc G/A tgtgctgattttaggaaata | 354 | | |
| TPST2 | 14 | intron 4 1051 | gcgtgtgctgattttaggaa A/G taaacagttatcgtattgaa | 355 | | |
| TPST2 | 15 | intron 4 1356 | gattcaacgtacataccagc C/T gacattgacaggtgaatggc | 356 | | |
| TPST2 | 16 | intron 4 1707 | gtctccttaaaaggtggctc G/T ctgcccctggcttgccccag | 357 | | |
| TPST2 | 17 | intron 5 215 | aagaccagcctgaccaaaac G/A gtgaaaccccgtctctacta | 358 | | |
| TPST2 | 18 | intron 5 341 | tgggaggcagaggtcgcagt G/A agctgagatcacgccgttgc | 359 | | |
| TPST2 | 19 | intron 6 31 | ggacttcactgggggttccc G/A ctgcttctgggtggccccgg | 360 | | |
| TPST2 | 20 | intron 6 273 | gtttgtctgacactggggac A/G gggcaggaagcaccactatg | 361 | | |
| TPST2 | 21 | intron 6 693 | aaagggatttttttgaactt G/C gtaattcaaagatttaagat | 362 | | |
| TPST2 | 22 | intron 6 1635 | tcctgggtacagagttggcc T/G tgaacaaacatgagtccttc | 363 | | |
| TPST2 | 23 | 3′untranslated region 1147 | cttccccactttcagatctc C/T gcaaatgacttcattgccaa | 364 | | |
| SULT1A3 | 1 | exon 8 843 | cgcttcgatgcggactatgc G/A gagaagatggcaggctgcag | 365 | | |
| CST | 1 | intron 1b 6302 | agagctccccagagaggact A/G tgaggctgcatgatgcatga | 366 | | |
| CST | 2 | intron 2a 1004 | gagtgagacccccatctcta C/T aaaattttttttaaaaagta | 367 | | |
| CST | 3 | intron 2a 1395 | atgcctaagtttacagtagc T/C ggggcccctccatggctgcc | 368 | | |
| CST | 4 | intron 1d 473 | ccagagcctgaggttggtgc T/A gtccctgtctggaccctgct | 369 | | |
| CST | 5 | intron 2b 726 | ctatctctccagtgcctctc T/C gtccctgtctggaccctgct | 370 | | |
| CST | 6 | intron 2b 745 | ctgtccctgtctggaccctg C/A tggggggccacagagcaggc | 371 | | |
| CST | 7 | intron 3 85 | tcactagtttcctgctgctg G/A tgtactcctatgccgtgccc | 372 | | |
| CST | 8 | intron 3 308 | tcgtctgaggtcaggagttc G/A agaccagcctggccaacatg | 373 | | |
| CST | 9 | intron 3 853 | ttttgtcctataaaatggca G/A tttcatgtggcccaagctga | 374 | | |
| CST | 10 | exon 4 198 | gaggcagtgatccgggccaa G/T ggctcggcgggggagtgcca | 375 | | |
| SULT1C1 | 1 | intron 3 2280 | gcaaatttttggtattttta G/T tacagtcagggttttaccat | 376 | | |
| SULT1C1 | 2 | intron 3 3742 | gcagatctcactttctggca G/A attccctgaatttgctcccc | 377 | | |
| SULT1C1 | 3 | intron 3 4453 | ttcatagggcttttccctca C/T ttgttttgtaattttgtata | 378 | | |
| SULT1C1 | 4 | intron 3 5234 | gaaaagagactagaggcagg A/G gagctttgcagttcttctaa | 379 | | |
| SULT1C1 | 5 | intron 3 6175 | tggctggcaggaaggtgagg G/C agtcctctcttctctggtcc | 380 | | |
| SULT1C1 | 6 | intron 3 205 | acatgaaggcaggatccaga T/C tgaatgtttggagggaacta | 381 | | |
| SULT1C1 | 7 | intron 3 408 | ggctcacgcctgtaatccca G/C cactttgggaggccgaggcg | 382 | | |
| SULT1C1 | 8 | intron 3 429 | cactttgggaggccgaggcg G/C gtggatcacaaagtcaggag | 383 | | |
| SULT1C2 | 1 | 5′flanking region − 110 | tcctgttaactcacagagaa C/T ggaagggctggaacgggacc | 384 | | |
| SULT1C2 | 2 | exon 1 15 | acactaatggccttacacga C/G atggaggattttacatttga | 385 | | |
| SULT1C2 | 3 | intron 1 297 | gtagacttgtttatttattc A/C ttcccaatctaggcccttat | 386 | | |
| SULT1C2 | 4 | intron 1 363 | gagtgtgtgagctagaaagg T/G gatcctgagtctgatttggg | 387 | | |
| SULT1C2 | 5 | intron 1 2300 | gggctactatcagcagccac C/T acctcaggaaggatgacttc | 388 | | |
| SULT1C2 | 6 | intron 2 455 | aagacttggaagcaaataga T/G aaaaaaaaaatcgtagaaat | 389 | | |
| SULT1C2 | 7 | intron 4 55 | caaaatctccaaacacccta G/A aaggaaagaatcttttcttt | 390 | | |
| SULT1C2 | 8 | intron 4 111 | ctgccttctttaatggaaca T/C tctcacttctcttcaggaat | 391 | | |
| SULT1C2 | 9 | intron 5 1857 | ctttgtgtttactttgtttt T/C acttggtacaaaagtgttgt | 392 | | |
| SULT1C2 | 10 | intron 5 2082 | ctttgtgtttactttgtttt T/C gtcccacagccacagtgatg | 393 | | |
| SULT1C2 | 11 | intron 5 933 | agctactgaacctctcccac A/G taactgtatttcaggggcag | 394 | | |
| ST1B2 | 1 | intron 1 80 | acttgtccataaaatcatta C/T cattctaaataaagttaata | 395 | | |
| ST1B2 | 2 | intron 2 − 352 | aacatttaaatagtcattta T/C agcaatgcacaggtataata | 396 | | |
| ST1B2 | 3 | intron 2 − 85 | attcataatgctcaaaaaat G/A tcttgaaaaactggttggca | 397 | | |
| ST1B2 | 4 | intron 4 460 | gtacttgacattaaaaaata T/C ctgatgtttatatatccata | 398 | | |
| ST1B2 | 5 | intron 4 470 | ttaaaaaatatctgatgttt A/G tatatccataaatagctaat | 399 | | |
| ST1B2 | 6 | intron 4 518 | tttaagattgtcctcatatt C/G ttacttcctttggttactaa | 400 | | |
| ST1B2 | 7 | intron 4 616 | aatgtttatgaaaatagact T/C ttatctggttttagtggcct | 401 | | |
| ST1B2 | 8 | intron 5 58 | ctgcatcatgctgtaaaagg G/A ttgatatttgctttccaact | 402 | | |
| ST1B2 | 9 | exon 6 612 | taatagaatccaaaggagga A/C atcaagaagatcattagatt | 403 | | |
| ST1B2 | 10 | intron 6 582 | aatacattacttccatttaa G/A tagtctgtttattgtggctt | 404 | | |
| ST1B2 | 11 | intron 6 3130 | agatgtaaaaaattattcaa A/T ttttcaaaagcctgaaaatt | 405 | | |
| ST1B2 | 12 | 3′untranslated region 907 | tttaaagtgtctaaatcaca C/A atctgaagaaatcagagatt | 406 | | |
| ST1B2 | 13 | 3′flanking region 50 | tcagatcccagttttgttcc T/G ttgattctgagtttggaaat | 407 | | |
| ST1B2 | 14 | 3′flanking region 328 | tttgacccaggacactgtgt T/G ccactgctgtctaccgagtt | 408 | | |
| ST1B2 | 15 | 3′flanking region 446 | gtagttcagattttggaaat G/A ttttttctatatcataccta | 409 | | |
| CHST2 | 1 | 5′flanking region − 260 | agccggacagtccgccgggc G/A gtgatccgggggccgctccc | 410 | | |
| CHST2 | 2 | 5′flanking region − 56 | gcgctggggaccagccgccg C/T gcccgcctcggagtcgcggc | 411 | | |
| CHST2 | 3 | 5′flanking region 218 | aggagtgaaacacatctttg T/A attctaaaggcagaaaccaa | 412 | | |
| CHST2 | 4 | 5′flanking region 383 | gcagagaccaatgttttggt G/C ctgaggctggttcagaaaaa | 413 | | |
| CHST2 | 5 | 5′flanking region 952 | tactgaaacattctgcagaa T/C gttatactatgagaagaaat | 414 | | |
| SULT2A1 | 1 | intron 2 478 | ggactgggctctgtacacac T/C tcgtcttactgtgtgtaaat | 415 | | |
| SULT2A1 | 2 | intron 2 382 | caaaaccctcttaatattct G/A tttctatctgtctcagaact | 416 | | |
| SULT2A1 | 3 | intron 2 409 | tctgtctcagaactgattgc A/G tgactctaggatcgctatat | 417 | | |
| SULT2A1 | 4 | intron 2 249 | agctggaaattacaggcaca C/T gccaccacacccagctaatt | 418 | | |
| SULT2A1 | 5 | intron 2 395 | aggcatgagccacggcgccc G/A gccaatttatcagctttaat | 419 | | |
| SULT2A1 | 6 | 3′flanking region 33 | ttccttgttaaaagttacca G/C ggttggccaggcacggtggt | 420 | | |
| SULT2A1 | 7 | 3′flanking region 46 | gttaccagggttggccaggc A/G cggtggttcatgcctgtaat | 421 | | |
| SULT2A1 | 8 | 3′flanking region 199 | ttagccaggcgcattggctc A/G tgtctgtaatcccagcactt | 422 | | |
| SULT2B1 | 1 | intron 2 4162 | ttctcccctctcctcaccat C/T cgcacacaggtgatctacat | 423 | | |
| SULT2B1 | 2 | intron 3 879 | gagggcatccagctctgggg G/A ctggacctgggggtttgtgg | 424 | | |
| SULT2B1 | 3 | intron 4 3882 | ttccacgctccttccttggc C/T catgtccaagcagtaatggc | 425 | | |
| SULT2B1 | 4 | intron 5 1780 | cctgcagaagggggtccctt C/T ttgtgggggcattgagacag | 426 | | |
| SULT2B1 | 5 | intron 5 1814 | taatggctgcagcatggagc G/A ttgtgggggcattgagacag | 427 | | |
| SULT2B1 | 6 | extron 6 789 | ccctcttctccaggggtctg C/T ggcgactggaagaaccactt | 428 | | |
| CHST4 | 1 | 5′flanking region − 1092 | atgaagccttgtgccatctc G/A ctgtgtcgtgccagcacctg | 429 | | |
| CHST4 | 2 | 5′flanking region − 941 | ctgccagagagaaacaggaa G/A ggaggaagagccacacaatt | 430 | | |
| CHST4 | 3 | intron 1 − 150 | caggaaatgatttggagaag G/T actggtgccattgttggcac | 431 | | |
| CHST5 | 1 | intron 1 − 144 | ggcctcttaggtttcagcca A/C gacaggtgactcttagcacc | 432 | | |
| CHST5 | 2 | intron 2 17 | caacgtaagagcgcttctca T/A tgtccagctcctttgtttct | 433 | | |
| CHST5 | 3 | intron 2 139 | aatcccagcactttgggagg C/A ggagatgtgcggatggatca | 434 | | |
| CHST5 | 4 | intron 3 1828 | gactgtatgtctgctattca T/C ataggaacaaataattcatg | 435 | | |
| CHST5 | 5 | intron 3 2037 | aaatgaaaccaacaccaaca C/G tgcagagaagcaaacaaaag | 436 | | |
| CHST5 | 6 | intron 3 2134 | aagcagctaaattgtgttcc G/A tacaggtgcaattaggcagg | 437 | | |
| CHST5 | 7 | intron 3 2528 | atggtaaagttcgcctgggt G/A cagtatgtcagcatcctgct | 438 | | |
| CHST5 | 8 | intron 3 2674 | gcacttatcctagaaaggcc A/G tttctgaagactcagcagga | 439 | | |
| CHST5 | 9 | intron 3 7039 | ctggctcccgccggccaccc T/C gggaccgcagccacgtctga | 440 | | |
| CHST5 | 10 | intron 3 7211 | gtagccccaggacaccccca T/G cctcaacatcccattctggg | 441 | | |
| CHST5 | 11 | intron 3 7294 | ggagcttccagtggcttggt T/C acccccgactcttcgtccat | 442 | | |
| CHST5 | 12 | intron 4 108 | gcagggtcctgcactctgca G/A ggggcaatcacaggtgggag | 443 | | |
| CHST5 | 13 | intron 4 402 | ctggctcccgccggccaccc T/C gggaccgcagccacgtctga | 444 | | |
| CHST5 | 14 | intron 4 547 | gtagccccaggacaccccca T/G gaaggagcagaggtgagatc | 445 | | |
| CHST5 | 15 | intron 4 1142 | gccccaggtctcatagctcc C/G cattggcagtgctgggattt | 446 | | |
| CHST5 | 16 | intron 4 1187 | cactgggcagtaattggggc A/G tgggatgggcatgagggccc | 447 | | |
| HNK-1st | 1 | intron 1 139 | gtgttttggcgacttgaaga C/T ctccctagttcgcgggagta | 448 | | |
| HNK-1st | 2 | intron 1 1020 | acctgagcagaaaattctct T/C cttcgctgaaatgaaaattg | 449 | | |
| HNK-1st | 3 | intron 1 1091 | aagaatttgtaaacatcaca G/A gcaacttgcagttatattcg | 450 | | |
| HNK-1st | 4 | intron 1 1971 | ctataactatttcaaacata C/T gaaacaggcataattggatt | 451 | | |
| HNK-1st | 5 | intron 1 2096 | atttagaatattcatttacc A/C agaaatccaaatataacctg | 452 | | |
| HNK-1st | 6 | 5′untranslated region − 91 | ctatccagtgacaagaggaa C/A caagaacctcagttcagggg | 453 | | |
| HNK-1st | 7 | intron 2 − 530 | agtgggcggaggcgagaagc G/A tcagtgttcattcctttgct | 454 | | |
| HNK-1st | 8 | intron 2 − 466 | gctacatcttgtcagccagt C/T agaattttaaacacagccag | 455 | | |
| HNK-1st | 9 | intron 2 − 92 | acggaaatatttgtgctgat A/T cttactgactgaaatcacct | 456 | | |
| HNK-1st | 10 | intron 3 152 | catggcctccgttccttcat G/A ttacagaggtgtgaggggag | 457 | | |
| HNK-1st | 11 | intron 3 312 | cacagtggccttatgccttg C/T agcagggcgcctctcaggct | 458 | | |
| HNK-1st | 12 | intron 3 1948 | tcctttgatgtatcaagttt T/C gtgctgaatgttttcagtgt | 459 | | |
| HNK-1st | 13 | intron 3 2140 | ttacacctggagaggagcac C/T gcagcggtccttaatactgc | 460 | | |
| HNK-1st | 14 | intron 4 187 | agaagcacattcctgaggaa C/T tgaaggtgggcacagccagg | 461 | | |
| HNK-1st | 15 | intron 4 581 | cctgatcattccctagctgg G/A atgaggggtgcactctggaa | 462 | | |
| HNK-1st | 16 | intron 4 615 | tctggaaggcctctcacttc G/C taacccccattctggatcta | 463 | | |
| HNK-1st | 17 | intron 5 7 | gattgttctaaatggtgtgt G/A tgggtctactgaatgtccac | 464 | | |
| HNK-1st | 18 | intron 5 123 | acctgaagggactggtggcc G/T tccagacaggcctgtttttg | 465 | | |
| HNK-1st | 19 | intron 5 721 | ataattatgggctctgctta T/C gaaatttagcttcagacagg | 466 | | |
| HNK-1st | 20 | intron 5 867 | tgctgcccacagagtcggtg G/A tcactcctggccactgtttg | 467 | | |
| HNK-1st | 21 | intron 6 444 | ccaggagcattttcttccat T/C gaggagatccccgaaaacgt | 468 | | |
| HNK-1st | 22 | intron 6 94 | ctgagttctgtacttggcag A/G ttgatcggaggaccacagag | 469 | | |
| HNK-1st | 23 | intron 6 247 | catgaaggtgacatcatttt G/A ttaatagaaattagcaggca | 470 | | |
| HNK-1st | 24 | intron 7 696 | aggaggaaccggacagagac C/G cgggggatccagtttgaaga | 471 | | |
| HNK-1st | 25 | intron 7 870 | gagaccctggaggacgatgc C/T ccatacatcttaaaagaggc | 472 | | |
| HNK-1st | 26 | 3′untranslated region 1110 | tcaaatatctttattagacc T/C ggggctaaccaggtgaagat | 473 | | |
| HNK-1st | 27 | 3′untranslated region 1178 | ccacacccctcctttgagga C/T gcccggggtctcccacaggc | 474 | | |
| HNK-1st | 28 | 3′untranslated region 1393 | ggaagcatcacacagcgtta G/A gagccgtttccttcaggtgt | 475 | | |
| HNK-1st | 29 | 3′untranslated region 1452 | tgaggttctcctggctagtc A/G gggtggcttcacccatcact | 476 | | |
| HNK-1st | 30 | 3′untranslated region 1540 | gcaagggggctgctgaaatc G/C cagagacttttgcagcatca | 477 | | |
| HNK-1st | 31 | 3′untranslated region 1696 | gggtggtgtggtgtccaggg G/A tccatctttccagaatccat | 478 | | |
| HNK-1st | 32 | 3′untranslated region 1829 | aggggaggctttttctacct G/A agaaggggagtgtctttgag | 479 | | |
| HNK-1st | 33 | 3′untranslated region 2211 | tccagcagtgcggcttcctg G/T caacaaggtaggccctggtg | 480 | | |
| HNK-1st | 34 | 3′untranslated region 2212 | ccagcagtgcggcttcctgg C/T aacaaggtaggccctggtgc | 481 | | |
| HNK-1st | 35 | 3′flanking region 1016 | cacacgaaggtgtgcactca C/T ggcctgcagggcacccaggt | 482 | | |
| HNK-1st | 36 | 3′flanking region 1152 | gcatgctttgctcatctgga A/C tctccagaagcagggaacag | 483 | | |
| HNK-1st | 37 | 3′flanking region 1291 | gccgagaccctcagcaggat A/G gtgcagttacagggctgagc | 484 | | |
| STE | 1 | 5′flanking region − 605 | caggtttctaaaataataat C/T gaaaggtgagtgatgtttac | 485 | | |
| STE | 2 | 5′flanking region − 536 | taaaattttcaggtctgctt A/G agagttaaaggcaaagagtt | 486 | | |
| STE | 3 | 5′flanking region − 231 | ccttcttccccaacccctga C/T gaaaggtgagtgatgtttac | 487 | | |
| STE | 4 | 5′untranslated region − 64 | tgcagcttaagatctgcctt G/A gtatttgaagagatataaac | 488 | | |
| STE | 5 | intron 1 69 | aaatatagaatgaaaattat G/A tattaccaagctcttaaaaa | 489 | | |
| STE | 6 | intron 1 311 | caatgagaaaataaagcaag C/G agggtagaaggaggtagaat | 490 | | |
| STE | 7 | intron 1 655 | tctaagaaagtagggactat G/A agaacccctatgtatctata | 491 | | |
| STE | 8 | intron 1 671 | ctatgagaacccctatgtat C/T tatatccaccatagtattct | 492 | | |
| STE | 9 | intron 1 772 | aaaaggcaggttggaagatg C/A aggaggggagtatgcagaaa | 493 | | |
| STE | 10 | intron 1 1716 | taaccatcttgcttaacctt A/G tcatttttagccaagtcatt | 494 | | |
| STE | 11 | intron 1 1928 | aaatgatacatattcaggaa A/G tcaaaaatctctgacttaga | 495 | | |
| STE | 12 | intron 1 1953 | aaatctctgacttagatacc C/T ggcaataataatcaaatgta | 496 | | |
| STE | 13 | intron 1 2087 | aattttgaaagaaattgaag T/G tctgtggtttttatttatca | 497 | | |
| STE | 14 | intron 1 2323 | taggtatgtaggagggtccc G/C ttatatacatagttgttaat | 498 | | |
| STE | 15 | intron 2 165 | tctattccatgaccacaatt T/G ttacctgtaacttgaatagt | 499 | | |
| STE | 16 | intron 2 1707 | cctaggacccaacatgagac A/G taatataccatcagtaaaat | 500 | | |
| STE | 17 | intron 3 850 | ggtgtccattccctcaagaa T/G ttatactttgtgttacacac | 501 | | |
| STE | 18 | intron 4 1653 | agtaacaggctagtagataa T/C ataaataactgaggccaacg | 502 | | |
| STE | 19 | intron 4 1899 | tacatgaacttagagaatca A/G gtagatcacacacaccaaca | 503 | | |
| STE | 20 | intron 4 1930 | cacaccaacaataaaattac A/G cagaatgataaaagaatttg | 504 | | |
| STE | 21 | intron 5 666 | ttctgatcatgtagtaacaa T/C tataaagaaaataataatgt | 505 | | |
| STE | 22 | intron 5 982 | aggcaaagcagaaccttttg A/C ctcacacaacattatattat | 506 | | |
| STE | 23 | intron 7 369 | agattttattcctctctctt T/C ttgagttgaagaaataagtt | 507 | | |
| STE | 24 | intron 7 447 | cacctttcaagggtaagtgg C/A aaaaaatagaaattcaaata | 508 | | |
| STE | 25 | intron 7 672 | aatcttgctctttgaaccat A/T ctgtcagtgagagtcaggga | 509 | | |
| STE | 26 | intron 7 856 | tgttacagaggacttaaaac A/G gttgtcttgcttgcaaacgg | 510 | | |
| STE | 27 | 3′flanking region 218 | cagcctcccaagtagctagg A/G ctacagacatgtgcaaccat | 511 | | |
| ADH1 | 1 | 5′flanking region − 55 | atcatgtgtggaactggaat C/T gggtgttattcaagcaaaaa | 512 | | |
| ADH1 | 2 | intron 1 268 | acatttgcggtaaagcgata A/G tttattccaagctaatcatg | 513 | | |
| ADH1 | 3 | intron 3 442 | aaatggaggctacatggcta C/A ggctgaatgagcatgacctt | 514 | | |
| ADH1 | 4 | intron 6 56 | tacaacttggaggatgcatt T/G aggctgcagaatatatgttt | 515 | | |
| ADH1 | 5 | intron 8 74 | gtctagcagaaaatgaaaag G/A tggaaggatgagaaaaatta | 516 | | |
| ADH2 | 1 | intron 2 340 | ctattttttaaagcgtgcat T/C cttacataagacttaaatat | 517 | | |
| ADH2 | 2 | intron 3 91 | aaggcaatgagagacgaaag T/G gcttgcacaaggtcaccgcg | 518 | | |
| ADH2 | 3 | intron 3 205 | atgtattgtacccttcaacc A/G ttatgtaccgagtatctact | 519 | | |
| ADH2 | 4 | intron 7 108 | acaattgacaaggcaagatt T/C tgaaaacaaatcaaaaataa | 520 | | |
| ADH3 | 1 | 5′flanking region − 254 | tgagagaagagaagcaggaa C/G ttgagagaggaggaagagag | 521 | | |
| ADH3 | 2 | intron 2 355 | tatgcattcttctatattat A/G caagacaaaaattttaggat | 522 | | |
| ADH3 | 3 | intron 3 32 | acactcagggaacatgcctt G/A gttcaccatcacaagattag | 523 | | |
| ADH3 | 4 | intron 4 6 | ctgcttgaaaaatgagtaag C/T ttctgatgctttctttgcac | 524 | | |
| ADH3 | 5 | exon 5 453 | agcaccttctcccagtacac A/G gtggtggatgagaatgcagt | 525 | | |
| ADH3 | 6 | exon 6 815 | ttcgtttgaagtcatcggtc A/G gcttgacaccatggtatgat | 526 | | |
| ADH6 | 1 | intron 3 249 | tgaaactggacttgaaagta G/A aaatgagacaaaaatttatg | 527 | | |
| ADH6 | 2 | intron 6 815 | ttcgtttgaagtcatcggtc A/G gcttgacaccatggtatgat | 528 | | |
| ADH6 | 3 | exon 7 885 | gtctgtgtggttgttggggt G/A ttgcctgccagtgttcaact | 529 | | |
| ADH6 | 4 | intron 7 1292 | gttgagaaacactgcctagt C/A ccgtctgtggtcctagaatt | 530 | | |
| ADH6 | 5 | intron 7 1616 | ctatcacagaataatccgca T/C agaacactaagcagattacg | 531 | | |
| ADH7 | 1 | 5′flanking region − 528 | tgtgcagacacagaaagttt T/C acttaactttctacccctaa | 532 | | |
| ADH7 | 2 | intron 1 361 | tcagtagcatgtgctgcact C/T gctgcagtagttcaatggga | 533 | | |
| ADH7 | 3 | intron 3 183 | aacctcaacctttagaaggc A/G aaccttacggtgtttataaa | 534 | | |
| ADH7 | 4 | intron 4 76 | tgaattgaattaattaatac G/A tgtatttgatgtatcaaaca | 535 | | |
| ADH7 | 5 | intron 5 615 | tggcatagcgtaaagagact T/A ggaaaaatggaataaagcca | 536 | | |
| ADH7 | 6 | intron 8 532 | aagtctaaccatatcaccaa T/G ttagtatgccattgtactat | 537 | | |
| ADH7 | 7 | intron 8 651 | gctgctatttatttcaagta G/A gccacaaaatttccttattt | 538 | | |
| ADH7 | 8 | intron 8 760 | catttttagatgaagaccaa T/G gttgtgaaagcaaataaata | 539 | | |
| ADH7 | 9 | intron 8 1207 | tctccacatttggtctagcc T/C acaggatcatcatattatga | 540 | | |
| ADH7 | 10 | intron 8 1691 | tccctcatctcattgcccac G/A ctcattgctttaattcagtc | 541 | | |
| ADH7 | 11 | 3′untranslated region 1354 | atttacattttgtaaggcta T/C aattgtatcttttaagaaaa | 542 | | |
| ADH7 | 12 | 3′untranslated region 1498 | gatatagtaaatgcatctcc T/C agagtaatattcacttaaca | 543 | | |
| ADH7 | 13 | 3′untranslated region 1584 | aaacacttgttatgagttaa C/G ttggattacattttgaaatc | 544 | | |
| ADH7 | 14 | 3′untranslated region 1818 | aatataaacatagagctaga A/G tcatattatcatacttatca | 545 | | |
| ADH7 | 15 | 3′flanking region 865 | tacatcaaaagaaataaatc G/T aagaaggaataaacacattt | 546 | | |
| HEP27 | 1 | 5′flanking region − 191 | tcagcactctgtgtctagct A/T aaggtttgtaaatgcaccaa | 547 | | |
| HEP27 | 2 | 5′untranslated region − 163 | gaacccatcaattccgtaca C/A attttggtgactttgaagag | 548 | | |
| HEP27 | 3 | intron 1 1941 | aaatttaccctaaccagcct G/C actctctgccactttctgtt | 549 | | |
| HEP27 | 4 | exon 3 289 | ttgtgtgccacgtggggaag G/A ctgaggaccgggagcagctg | 550 | | |
| HEP27 | 5 | intron 4 1070 | tgtctcagttcacaggatca T/C gactctttttctcgaaactg | 551 | | |
| HEP27 | 6 | 3′flanking region 362 | ggctttgtgtgtgctccatt A/G tctgaactgggcctgctggg | 552 | | |
| L1CAM | 1 | intron 1 + 767 | tttgacttccttacatgggt G/A actgtgtgagtcactctgtt | 553 | | |
| L1CAM | 2 | intron 1 + 862 | gcattgggtcatgtgtatgt G/C tgagtggggctgaatgtaag | 554 | | |
| L1CAM | 3 | intron 1 + 1332 | cagggatgaaggagcagagc C/T gctgagaggccacacaggtg | 555 | | |
| L1CAM | 4 | intron 4 + 502 | tttccctggggttttccctt T/C gcattccatcctccctgagc | 556 | | |
| L1CAM | 5 | intron 18 + 147 | agcgacgttatgaaattccc G/A acacttcacatttctataat | 557 | | |
| L1CAM | 6 | intron 24 + 221 | ctccttagccccccagaggg C/T cccaactttaagagcatact | 558 | | |
| AANAT | 1 | 5′flanking − 542 | aggggtgcaggatggggtgt G/T agctggagggcagggggtag | 559 | | |
| AANAT | 2 | 5′flanking − 263 | ccccccacataagaggtggg C/G ttgtccaagactccgaggga | 560 | | |
| AANAT | 3 | intron3 39 | cgcccagctccagggaggcc T/A ctgaagacagaggtcagcca | 561 | | |
| AANAT | 4 | exon4 150 | cagccggccgtgcgccgggc C/T gcgctcatgtgcgaggacgc | 562 | | |
| ARD1 | 1 | intron1 + 317 | ccgtcggtctgctcggcccc C/G ctccctcggggctgggcagg | 563 | | |
| ARD1 | 2 | intron6 + 322 | gctcctcagcatctgctcac G/A ccagggacccacacctctct | 564 | | |
| ARD1 | 3 | intron6 + 1095 | aaggctccatcctgagacaa A/C aagtccagtgtgacctgccc | 565 | | |
| ARD1 | 4 | intron6 + 1179 | aggaggaagacctgtatccc A/G gggacaccctcctccactcc | 566 | | |
| ARD1 | 5 | intron7 + 159 | cctccaggctgctaggcaga C/T ggcctcctctaaagcccagc | 567 | | |
| ARD1 | 6 | intron7 + 295 | tgaccagccctgccacccga G/T gagccttgggcagaaccctg | 568 | | |
| ARD1 | 7 | intron7 + 416 | actaccatggaggcccccac G/A acagagcgctgccccttgac | 569 | | |
| NAT1 | 1 | 3′UTR 215 | aataataataataataataa A/T aaatgtattttaaagatggc | 570 | | |
| NAT2 | 1 | exon2 867 | cgtgcccaaacctggtgatg G/A atcccttactatttagaata | 571 | | |
| NAT2 | 2 | 3′flank 521 | ccatccatactttgccacaa G/A agaaggaacatgagctttat | 572 | | |
| NAT2 | 3 | 3′flank 573 | gatttgaaatcctgtggaca C/T ggggtgaattacttttaaaa | 573 | | |
| NAT2 | 4 | 3′flank 918 | attttctgtttgtaaattcc A/G gtatcagggctatagtttaa | 574 | | |
| NAT2 | 5 | 3′flank 979 | actattctccctcttcgact C/T gtgatgactataataatctt | 575 | | |
| NAT2 | 6 | 3′flank 1958 | tacctattgaagtaagccta C/T gtcatatccacctatttgtt | 576 | | |
| NAT2 | 7 | 3′flank 2034 | ccactgattcccagagctag T/G tcattaagaagacagtgcct | 577 | | |
| NAT2 | 8 | 3′flank 2201 | cagattactggagggctact G/A tttgctcaccaatgcaaatg | 578 | | |
| NAT2 | 9 | 3′flank 2818 | gggatatttgtctcctttct C/G cccagtgcatgttggaaacc | 579 | | |
| NAT2 | 10 | 3′flank 3237 | atatatattccaattaaaaa A/A caaaataaatttccgaaact | 580 | | |
| NAT2 | 11 | 3′flank 3388 | caacaaagagattttttaaa G/A ctttttaaaacaccagacag | 581 | | |
| NAT2 | 12 | 3′flank 3660 | cagcactattcgcaatagca A/G agatgtggaatcaatctaaa | 582 | | |
| NAT2 | 13 | 3′flank 3973 | agcagaaaaaataaataatg C/T gtactaggcttactacctgc | 583 | | |
| NAT2 | 14 | 3′flank 4029 | caaaacaaccccccatgaca T/C gagtttatctatataacaaa | 584 | | |
| NAT2 | 15 | 3′flank 4118 | ataagattaatatctgcata C/A aaatctttgtttacagcttg | 585 | | |
| NAT2 | 16 | 3′flank 4146 | tgtttacagcttgttatata C/T tgaattatgtctgctccccc | 586 | | |
| NAT2 | 17 | 3′flank 4279 | ttaatctgataggattggtg G/C ctttataagaaaaagaaaag | 587 | | |
| NAT2 | 18 | 3′flank 4323 | ttgctctctccccagtgcag T/G taccaaggaaaggccatgtg | 588 | | |
| NAT2 | 19 | 3′flank 4446 | tcaattggctttatctgcga T/C tctggaatcaggcaatactc | 589 | | |
| NAT2 | 20 | 3′flank 4462 | gcgattctggaatcaggcaa T/C actccatttcataaaacaga | 590 | | |
| GZMA | 1 | 5′flanking − 462 | cctcagcttgcacttggcct A/G ctaattcttatataatccaa | 591 | | |
| GZMA | 2 | 5′flanking − 172 | agcctgcctgctggcagtga G/C ccatcatccaccattctcac | 592 | | |
| GZMA | 3 | intron1 1949 | gacataaggttctctctatc A/T gcatgtatggtttgccttgt | 593 | | |
| GZMA | 4 | intron2 + 683 | gactgcgtgaccaggtggaa C/T tagcctcagcatggaagggt | 594 | | |
| GZMA | 5 | intron2 + 1250 | gttggtgtagtttatactag G/A ttatgaatgatagccttaat | 595 | | |
| GZMA | 6 | exon4 + 105 | tgccaagttgcagggtgggg C/G aggactcacaatagtgcatc | 596 | | |
| GZMA | 7 | intron4 + 696 | atagagccttacctgaagaa A/G ggtgtgcagtatgcatggtt | 597 | | |
| GZMA | 8 | intron4 + 1141 | ctgttcagggaggatcccgg G/A ttccaacatggttctttatt | 598 | | |
| GZMB | 1 | 5′flanking + 529 | gcctccgtctcacaccaaca A/G gcagatttccccaccacggc | 599 | | |
| GZMB | 2 | intron3 + 141 | gagggaagattgtgcagccc C/T atcactgtgtcggggcccag | 600 | | |
| GZMB | 3 | 3′flanking + 448 | ttttcagggcctgtccctcc G/A atgggggcaggcttctccca | 601 | | |
| ESD | 1 | 5′flanking − 323 | gtcttgggacagaggagttg G/A gggagttgaaattaggccct | 602 | | |
| ESD | 2 | intron 1 603 | gtcatttctgatggggtcat C/T agggaaatgggattgagcgc | 603 | | |
| ESD | 3 | intron 1 717 | tgtgtggtagaagcagcatt C/T taagcactacgtgaattaac | 604 | | |
| ESD | 4 | intron 1 1864 | gctttcatgcaggattgatc G/C tagtgggatgtattaggaag | 605 | | |
| ESD | 5 | intron 1 2389 | ttttgggaacacctgtctag G/A tgttaagagccagtggaata | 606 | | |
| ESD | 6 | intron 2 21 | taaacttgttttattgttta G/A tgttaagagccagtggaata | 607 | | |
| ESD | 7 | intron 2 588 | taaaattagtatctctctct G/A taagttcattatttaagata | 608 | | |
| ESD | 8 | intron 2 1498 | tagaaaaatgtgtatcacac C/T gtaagtgttcagtaatgtta | 609 | | |
| ESD | 9 | intron 3 92 | ctttatctagatattatagt C/A cctcattttacttttaaact | 610 | | |
| ESD | 10 | intron 3 422 | gtaaagagattaaacacaca C/T gcacacatacatatacctat | 611 | | |
| ESD | 11 | intron 3 581 | agaaaacctgagaaatgaca C/T aatttatttaaagccatagt | 612 | | |
| ESD | 12 | intron 3 2270 | gccagtaattacatgtagcc G/A tttacatcaaattagctaat | 613 | | |
| ESD | 13 | intron 3 2951 | taatgaaagtaaatgtttca A/G cttccctaacaaaagttgaa | 614 | | |
| ESD | 14 | intron 3 3001 | aaatgtcagaaattttttgt G/A ccgtcagtcatcaacaagaa | 615 | | |
| ESD | 15 | intron 3 3096 | aaggagcatacagaaaactt G/C ccatgatggggcctttgtgg | 616 | | |
| ESD | 16 | intron 4 2611 | tctaatagtccccagtatta A/G tggtgcacatcttcatgtcc | 617 | | |
| ESD | 17 | intron 5 390 | tcttttttcatctctgttaa C/T atcaaccatacagttaaaca | 618 | | |
| ESD | 18 | intron 7 107 | ttagtattggaactaaactt t/C tctagtgttgagaactttgg | 619 | | |
| ESD | 19 | intron 8 1090 | aaattctaactaattaaagg G/T ttcatcctttagtaactaga | 620 | | |
| ESD | 20 | intron 8 1651 | tataaagttgtggttaatga A/G tatatatgaataagaatatt | 621 | | |
| ESD | 21 | intron 8 2047 | agaaggaaaaaggccatttt G/C ttaagaatccctgagatatg | 622 | | |
| ESD | 22 | intron 9 − 3490 | atagaaggagaggctatact A/G cctccttaagtctcaggacc | 623 | | |
| ESD | 23 | intron 9 − 2596 | actaaggataaaaatatggc A/G tactcagtcacattggaact | 624 | | |
| ESD | 24 | intron 9 − 666 | aggccttaatgacatatttc T/C cctcacataaagatacaaca | 625 | | |
| ESD | 25 | intron 9 − 660 | taatgacatatttcccctca A/C ataaagatacaacatgcttt | 626 | | |
| ESD | 26 | intron 10 799 | tatggtaactgaagaaaatg A/G cattaagttcctaaagttat | 627 | | |
| DDOST | 1 | intron2 628 | attctgttaagaagttctta T/C attaagaaatattgtctcct | 628 | | |
| DDOST | 2 | intron2 3125 | gagaatataggagcttctgc G/A tatgcctgaaagtcagtcag | 629 | | |
| DDOST | 3 | intron2 3920 | attactcatttaatgaataa A/G tggattactgagcactgtct | 630 | | |
| DDOST | 4 | intron3 189 | actgctgtccaggggtccat C/T tggggctgagcccagctgga | 631 | | |
| DDOST | 5 | intron6 185 | ctgtcctcttgttcgggagg C/T gtggcagcttttcccttact | 632 | | |
| DDOST | 6 | exon8 37 | aactatgaactagctgtggc C/T ctctcccgctgggtgttcaa | 633 | | |
| DDOST | 7 | intron9 37 | tcctgcccaagaatgctgcc A/A aaaaacggccccaggcctca | 634 | | |
| MGST1 | 1 | 5′flanking − 5 | tctggaccctgaacaggagg G/C gacatcgtgacaaagcaaat | 635 | | |
| MGST1 | 2 | intron1A + 330 | atcagcaggcgatggttact C/G tgggcgggtaaatcaggtga | 636 | | |
| MGST1 | 3 | intron1C + 1428 | gtaaagggaaagggcgttcc T/A caactgagaagtgaagattc | 637 | | |
| MGST1 | 4 | repeat | attatttgctctacctcagg G/A tttttcgggtcaagcgagat | 638 | | |
| MGST1 | 5 | intron1C + 2914 | ctcatcaggtgtgtgtcaga G/T ggcttggtgctggccagtct | 639 | | |
| MGST1 | 6 | intron1C + 4274 | attgtaatagattaacaaag G/T tgatgaaagtagtgtacata | 640 | | |
| MGST1 | 7 | intron1C + 4276 | tgtaatagattaacaaagtt T/G atgaaagtagtgtacataat | 641 | | |
| MGST1 | 8 | intron1C + 4306 | gtgtacataatgtacatagt A/G tagttgaacacatagcaagc | 642 | | |
| MGST1 | 9 | intron1C + 4406 | gatggctatatgaccaataa T/A gatacatataaatgtataga | 643 | | |
| MGST1 | 10 | intron1C + 4464 | agaaagattgcagctgatag A/G tgtcaggctaataaggacac | 644 | | |
| MGST1 | 11 | intron1C + 4683 | aatggcagaggactggaaat G/T tacattttaagctttaccct | 645 | | |
| MGST1 | 12 | intron1C + 4767 | gccttcctcttcagcacatt C/T ccaattatacttccaattcc | 646 | | |
| MGST1 | 13 | repeat | atttcaatttttttttttgg G/A gggggagacagagtctcact | 647 | | |
| MGST1 | 14 | repeat | aattacctcccaaaggcctc A/T tatcccagatactatcacat | 648 | | |
| MGST1 | 15 | intron2 + 2379 | ttctcaaatttcattataca C/G tattcttcaacccaaagttt | 649 | | |
| MGST1 | 16 | intron2 + 2767 | tttaactatagatgccttct T/G ctcctcttgtgtttgattta | 650 | | |
| MGST1 | 17 | repeat | tcactgcagcctcaacctct C/T gggctcaggtgatcctccaa | 651 | | |
| MGST1 | 18 | repeat | aaaaaaatttgtagatatgg T/G tactccctatgttgcccagg | 652 | | |
| MGST1 | 19 | repeat | ctccctatgttgcccaggct A/G atcttgaattcttgggctca | 653 | | |
| MGST1 | 20 | intron3 + 1495 | gtcagacaatggccttcagc G/A tcctctctttgcagaatatg | 654 | | |
| MGST1 | 21 | intron3 + 2528 | ttttggagacacttttcaga G/C agagcgtttccagcatcttc | 655 | | |
| MGST1 | 22 | intron3 + 2567 | tccctttccatttttaagtt A/Δ gacttttttttttcacctct | 656 | | |
| MGST1 | 23 | intron3 + 2731 | atacacatatggaacaatta A/C ctaaaaacttaaggtaatat | 657 | | |
| MGST1 | 24 | intron3 + 3288 | gggtttatagtgttcccccc C/Δ tcccccgccccaaaagaccc | 658 | | |
| MGST1 | 25 | intron3 + 4288 | ccattctatttgtcaactgc G/A taacacaggcgtagaagtgg | 659 | | |
| MGST1 | 26 | intron3 + 4378 | aaatgtctgtccttttggca T/C gttgtgaaggagaacactaa | 660 | | |
| MGST1 | 27 | intron3 + 4429 | attggaggtgacgatatctc T/C gtgatgctgggggagaaatc | 661 | | |
| MGST1 | 28 | intron3 + 4817 | attgctatagaagagagtaa C/T gtaaagcagaaatagttttc | 662 | | |
| MGST1 | 29 | intron3 + 6077 | tttgaaattagtgtctttaa T/C agttatctttttccacagag | 663 | | |
| MGST1 | 30 | exon4 + 304(3′UTR) | aagaattctgtacttccaat T/G tataatgaatactttcttag | 664 | | |
| MGST1 | 31 | 3′flanking + 1581 | tctgtgtgcatgaacatgca C/T gcgtgcacgcgcacacacac | 665 | | |
| MGST1 | 32 | 3′flanking + 1729 | tatgtggagcaatttgaaaa A/T agtatattctaagccattaa | 666 | | |
| MGST1 | 33 | 3′flanking + 3407 | ggatcactgctaaagatccc G/A gagtcactccatgtcccagt | 667 | | |
| MGST1 | 34 | intron1B + 36 | ggagaaggggaccgcatgca G/A agggtggcaggcagggaggg | 668 | | |
| MGST1 | 35 | 3′flanking + 25 | gggtaaacccattttgaata T/C tagcattgccaatatcctgt | 669 | | |
| MGST1 | 36 | exon4 + 266(3′UTR) | aaagaaaatcatacaactca G/A catccagttggctttttaag | 670 | | |
| SULT1A2 | 1 | intron 4 1728 | tcagcttcctcctttgccaa A/Δ ccaagagatgagctggcctg | 671 | | |
| SULT1X3 | 1 | intron 1 6415 | tgacctctccctgttagtgt G/Δ ggggcagctctttccagtgt | 672 | | |
| SULT1X3 | 2 | intron 5 2457 | gcccttaaagggaagttcat C/Δ cttctctgccttccaggctc | 673 | | |
| PIG3 | 1 | 5′untranslated region − 93 | tccgcgaggatacagcggcc (CCTGY) cagacaatatgttagccgtg | 674 | | |
| ADH2 | 4 | intron 7 + 108 | acaattgacaaggcaagatt T/C tgaaaacaaatcaaaaataa | 675 | | |
| ADH2 | 5 | intron 3 + (1721-1723) | actgcatagaaatttaagaa GAA/Δ cttgttttattcctctccag | 676 | | |
| ADH2 | 6 | 3′untranslated + (2305-2306) | gttaatgctttcccactctc AG/Δ gggaaggatttgcattttga | 677 | | |
| ADH5 | 1 | 5′flanking − 115 | taactgctgtaaagttacac G/A gggaagccctttcccgacaa | 678 | | |
| ADH5 | 2 | 5′flanking − 114 | aactgctgtaaagttacacg G/A ggaagccctttcccgacaaa | 679 | | |
| ADH7 | 16 | intron 8 + 727 | ttcagatccctgtaagccag G/A tattatttttaccattttta | 680 | | |
| GSTM1 | 1 | 5′flanking − 694 | tacgaagtggctaatttaca C/T agtacttagccagatgaccg | 681 | | |
| GSTM1 | 2 | 5′flanking − 661 | gatgaccgaaggactcagta C/T ccgagggcccctaacagaaa | 682 | | |
| GSTM1 | 3 | 5′flanking − 658 | gaccgaaggactcagtaccc G/A agggcccctaacagaaaaca | 683 | | |
| GSTM1 | 4 | 5′flanking − 656 | ccgaaggactcagtacccga G/A ggcccctaacagaaaacaca | 684 | | |
| GSTM1 | 5 | 5′flanking − 537 | tagaggggagactaagccct G/C ggagtagctttcggatcaga | 685 | | |
| GSTM1 | 6 | 5′flanking − 525 | taagccctgggagtagcttt C/G ggatcagaggaagtcctgct | 686 | | |
| GSTM1 | 7 | 5′flanking − 465 | aattaaattcccaggttggg G/A ccaccactttttagtctgac | 687 | | |
| GSTM1 | 8 | 5′flanking − 383 | gcggagagaaggctgaggga C/T accgcgggcagggaggagaa | 688 | | |
| GSTM1 | 9 | 5′flanking − 382 | cggagagaaggctgagggac A/T ccgcgggcagggaggagaag | 689 | | |
| GSTM1 | 10 | 5′flanking − 378 | gagaaggctgagggacaccg C/T gggcagggaggagaagggag | 690 | | |
| GSTM1 | 11 | 5′flanking − 343 | agggagaagagctttgctcc G/A ttaggatctggctggtgtct | 691 | | |
| GSTM1 | 12 | intron 2 + 118 | tgctggagctgcaggctgtc T/C cttccctgagccccggtgag | 692 | | |
| GSTM1 | 12 | intron 2 + 233 | agtgagtgcccggtctcctc T/C ctgctcttgcttatgggaag | 693 | | |
| GSTM1 | 12 | intron 2 + 26 | tgtgggtggctgcaatgtgt G/A gggggaaggtggcctcctcc | 694 | | |
| GSTM1 | 12 | intron 2 + 140 | actatcagcagttattctca C/T gactccaatgtcatgtcaac | 695 | | |
| GSTM1 | 12 | intron 2 + 577 | ctgccaccccattagaagga A/G ctttctactttccctgagct | 696 | | |
| GSTM1 | 12 | intron 2 + 645 | gctggtctggatccagaggc T/A gccaggtgcttgggcgctcc | 697 | | |
| GSTM1 | 12 | exon 2 + 519 | caccgtatatttgagcccaa G/C tgcttggacgccttcccaaa | 698 | | |
| GSTM1 | 12 | exon 2 + 528 | tttgagcccaagtgcttgga C/T gccttcccaaatctgaagga | 699 | | |
| GSTM1 | 12 | intron 2 + 2421 | cagcaccgtgtagaatcttc A/G taagtgttagctgttactgt | 700 | | |
| GSTM1 | 12 | 3′flanking + 42 | atttgctcctggccatctac C/T cagactgtctgtctgtctgt | 701 | | |
| GSTM2 | 1 | intron 1 + 7 | ggaacatccgcggggtgagc C/G agggtccgctgggcggtggg | 702 | | |
| GSTM2 | 1 | intron 1 + 45 | gggacgggggtgcgtggggg C/T ggggaagtgtggagcagctg | 703 | | |
| GSTM2 | 1 | intron 3 + 70 | gactgcatctcctctcccca G/C cttagaggtgttaagatcag | 704 | | |
| GSTM2 | 1 | intron 3 + 224 | agcaggccctggtctcctct T/C tgcccttgcatatgggaagg | 705 | | |
| GSTM2 | 1 | intron 5 + 100 | ttgattccttctggtgagtt C/A ttggtcttgctgactctaag | 706 | | |
| GSTM2 | 1 | intron 5 + 341 | tcctcttggtgggttcatgg T/C ctggctggcttcaggagtga | 707 | | |
| GSTM2 | 1 | intron 5 + 696 | acctttagctagacacagag C/T gctgatttgtgcatttacaa | 708 | | |
| GSTM2 | 1 | intron 5 + 723 | ttgtgcatttacaatccttt A/G gctaggcagaaaagttctcc | 709 | | |
| GSTM2 | 1 | 3′untranslated + 1006 | tcctcttggtgggttcatgg T/C ctggctggcttcaggagtga | 710 | | |
| GSTM2 | 1 | 3′flanking + 139 | ttctgctgggcatagtaagg C/T gcttgagaattcttgctccc | 711 | | |
| GSTM3 | 2 | 5′flanking − 144 | ccaacgccggcattagtcgc G/T cctgcgcacggccctgtgga | 712 | | |
| GSTM3 | 3 | intron 7 + 165 | agcctaacttctataccttg A/G aggcactgtctacaaaaaaa | 713 | | |
| GSTM3 | 4 | intron 7 + 257 | ctgttggactgggtggggtc T/G ttataagattggtgtatttt | 714 | | |
| GSTM3 | 5 | exon 8 + 91 | cccagtggggcaacaagcct A/G tatgctgagcaggaggcaga | 715 | | |
| GSTM4 | 1 | intron 4 + 67 | ttggctggattggggtgcta T/C gctcagcgtgagtctgtgtt | 716 | | |
| GSTM4 | 2 | intron 7 + 77 | gatgctttcccagtcctgga T/G ctgcataaagaataacttgc | 717 | | |
| GSTM4 | 3 | intron 7 + 80 | gctttcccagtcctggatct G/A cataaagaataacttgcatt | 718 | | |
| GSTZ1 | 1 | 5′flanking − 546 | agcagggcccaccagccgac C/A gcctcgaagcgccgtgagcc | 719 | | |
| GSTZ1 | 2 | 5′flanking − 321 | tgtctgaccagccgccccgc T/C aaggagtcacaagagggcag | 720 | | |
| GSTM2 | 3 | intron 1 + 2890 | aaaatactgcatcaaaacca G/A gccacgctctgttgggggga | 721 | | |
| GSTM2 | 4 | intron 1 + 2896 | ctgcatcaaaaccaggccac G/A ctcgttgggggggacaccaa | 722 | | |
| GSTM2 | 5 | intron 2 + 255 | tctcccaacactgctctcca A/G agccccttggcaaccatgtt | 723 | | |
| GSTM2 | 6 | intron 2 + 1560 | caccactgtttaaggccctg G/C gggggcagagttaaacacaa | 724 | | |
| GSTM2 | 7 | intron 3 + 94 | ccttgaaaggcatcgactac G/A agacggtgcccatcaatctc | 725 | | |
| GSTM2 | 8 | intron 4 + 297 | agaaggaggagtttgctggc C/T ctgtcccctctggtccaggg | 726 | | |
| GSTM2 | 9 | intron 6 + 94 | tatctgaaccagcctcccag G/A ctgctttgggcctgacagtt | 727 | | |
| GSTPi | 1 | intron 1 + 269 | ctcccccgggctccagcaaa C/G ttttctttgttcgctgcagt | 728 | | |
| GSTPi | 2 | intron 1 + 134 | ccccgggcctccttcctgtt C/T cccgcctctcccgccatgcc | 729 | | |
| GSTPi | 3 | intron 1 + 438 | gtgtgtgcgcgtgcgtgtgc G/A tgtgtgtgcgtgtgtgtgtg | 730 | | |
| GSTPi | 4 | intron 1 + 162 | cccgctggctgagtccctag C/T ccccctgccctgcagatctc | 731 | | |
| GSTTi | 1 | 5′flanking − 103 | taaagagtgtcccaggcgtc C/T gtgccgcccaatggggcaca | 732 | | |
| MGST1L1 | 1 | 5′flanking − 105 | tgctgccgctgccgtggggc G/A ttctggagggtggagtgtgg | 733 | | |
| MGST1L1 | 2 | intron 1 + 277 | agtgtctgtgagagaagcag G/A ttctggagggtggagtgtgg | 734 | | |
| MGST1L1 | 3 | intron 1 + 8030 | ggggttatacagagcccctc C/G gcccccaccacacatatgca | 735 | | |
| MGST1L1 | 4 | intron 1 + 8499 | gtatggcaggagtggggtcc C/T ggcaagccatagaggtatgg | 736 | | |
| MGST1L1 | 5 | 3′untranslated + 468 | cgccacctgtgaccagcagc T/G gatgcctccttggccaccag | 737 | | |
| MGST2 | 1 | 5′flanking − 46 | ggtcagcattcaaagtcaag A/T agcgccatttatcttcccgt | 738 | | |
| MGST2 | 2 | intron 1 + 176 | ggtcacccatgccgcctgct A/C ccctccttcccaggggcaag | 739 | | |
| MGST2 | 3 | intron 1 + 204 | tcccaggggcaagcagagac T/C gagaacattccagagattag | 740 | | |
| MGST2 | 4 | intron 1 + 373 | ttacaagtgttccaaaggaa A/T cgtgcctgcttctaaacctg | 741 | | |
| MGST2 | 5 | intron 2 − 3245 | cctcgtgctttgcccacctc G/A gcctcccaaagtgctgggat | 742 | | |
| MGST2 | 6 | intron 2 − 1998 | aggccgaggtgggcggatca T/C gaggtcaggagatcgagacc | 743 | | |
| MGST2 | 7 | intron 2 − 1640 | tgtttattccttgcatagcc A/G taatataaagtatgaatttt | 744 | | |
| MGST2 | 8 | intron 3 + 41 | actgtgttctaatgatgact A/G tgatgcttaaacgattaagg | 745 | | |
| MGST2 | 9 | intron 3 + 453 | atcagagtgctatgttgcag A/G tatatgaactttggcttcat | 746 | | |
| MGST3 | 1 | 5′flanking − 520 | acaaaaaggccctaacagcg A/C taaatccattcacttcggga | 747 | | |
| MGST3 | 2 | 5′flanking − 355 | cgcctaaaaccgctacggtg G/A ctctgctggggacaaattat | 748 | | |
| MGST3 | 3 | 5′flanking − 234 | ctgggggagtagatatatgt T/A tttgagaatgagaggagtaa | 749 | | |
| MGST3 | 4 | intron 1 + 74 | agcctttgcgcaggcactcc C/T atatttcagcctatgcgagc | 750 | | |
| MGST3 | 5 | intron 1 + 682 | agaaaatgccccttctttat G/C tggggtggcagcacggagcc | 751 | | |
| MGST3 | 6 | intron 1 + 832 | cgagtttacaagctacataa T/C agcgtcgggggcaagtaagt | 752 | | |
| MGST3 | 7 | intron 1 + 1919 | aataaaattcctgagtttct G/C tcactcgctcttacagtacc | 753 | | |
| MGST3 | 8 | intron 1 + 1991 | tgtaattaggcaacaggaaa A/G ttgtactatctttcaaatgc | 754 | | |
| MGST3 | 9 | intron 1 + 4458 | tcttccatcctcctaacata T/C agttagcttccactctccaa | 755 | | |
| MGST3 | 10 | intron 1 + 4676 | tgaatatgcaatgcaattgt C/G gggggatagttacttttcat | 756 | | |
| MGST3 | 11 | intron 3 + 278 | cagcatgacccatctaaacc G/C atgttgactctcccaggcct | 757 | | |
| MGST3 | 12 | intron 4 + 423 | cttgcctttttgttgtgggg T/G gtggggtggtcacagagaag | 758 | | |
| MGST3 | 13 | intron 4 + 506 | gtgcagagaagaaaacaaag T/C ggggaaggtggaaaggggat | 759 | | |
| MGST3 | 14 | intron 4 − 162 | tcacagatattttattttcc C/T gactgaaactaacttaattc | 760 | | |
| MGST3 | 15 | intron 4 − 130 | acttaattctacctaatttg C/G gtggggagtagttggccaaa | 761 | | |
| MGST3 | 16 | intron 4 − 105 | ggagtagttggccaaatcat C/G aaattgttaactttttgcta | 762 | | |
| MGST3 | 17 | intron 4 − 65 | aacatattgtgtaatcaacc C/T taggtgttaaaaaaggtttg | 763 | | |
| MGST3 | 18 | intron 5 + 105 | atcccagcactttgggaggc G/C aaggcaggcagattgcttga | 764 | | |
| MGST3 | 19 | intron 5 + 197 | aaaaaatacaaaaattagcc G/A gatgtggtggtgcacacctg | 765 | | |
| MGST3 | 20 | intron 5 + 222 | tggtggtgcacacctgtagt C/T ccagctacttgggaggctga | 766 | | |
| MGST3 | 21 | intron 5 + 374 | tcttatgctactatattttt T/C ttcttgggaatttgagaaaa | 767 | | |
| MGST3 | 22 | 3′untranslated + 517 | atgacttacctttatttcca G/T ttacattttttttctaaata | 768 | | |
| MGST3 | 23 | 3′flanking + 166 | agtctgattgtggtgatgta G/T gtatagtcatgccacagtga | 769 | | |
| GSTA1 | 1 | 5′flanking − 266 | ttgcaaaaagagcaaaatct C/A ggtgaaatgtattgtgtaaa | 770 | | |
| GSTA1 | 2 | intron 2 + 1220 | gagacacaggctttcctaag A/C tatgacaacaccataactag | 771 | | |
| GSTA1 | 3 | intron 4 + 1813 | aaaggcacccactggaggtg A/C attattttgccatcacctga | 772 | | |
| GSTA1 | 4 | intron 5 + 732 | gaagagtgttgtcatgaagg T/C ggagtcactgcccaagggag | 773 | | |
| GSTA1 | 5 | intron 6 + 333 | ttatcccatatgtgcccaca A/G tgagccggtctgagcagagc | 774 | | |
| GSTA1 | 6 | 3′flanking + 412 | ctttcttatgcatttgcaaa A/C caatgattctgtctgctgtg | 775 | | |
| GSTA4 | 1 | intron 1 + 280 | gcattggtggaaggtgggct C/T ggatcgtccccgggcctgga | 776 | | |
| GSTA4 | 2 | intron 3 + 176 | ggaaatcacttcttattcaa T/C agttccataaaagctggccg | 777 | | |
| GSTA4 | 3 | intron 4 + 94 | acaccacatttactttatgt C/G ttacatagttagtgagatca | 778 | | |
| GSTA4 | 4 | intron 5 + 1062 | cacacttgtgcacatgcaga C/T acccatgggcatccaagagt | 779 | | |
| GSTA4 | 5 | intron 6 + 487 | cagatgtgattttactccaa A/G ccattttagctctagaagag | 780 | | |
| GSTA4 | 6 | intron 6 + 595 | tgagctctgagagcaaatga G/A agatgttagcaccctaaaca | 781 | | |
| GSTA4 | 7 | intron 6 + 630 | taaacatcaccccaaaggat T/A cctaccattctccttctgag | 782 | | |
| GSTA4 | 8 | intron 6 + 3943 | tcttcgtagtatctaatacc T/C tttttgttagccttaaagtt | 783 | | |
| GSTA4 | 9 | 3′untranslated + 1099 | taataacaaccgaatgtcta G/A taaatgactctcctctgagc | 784 | | |
| GSTA4 | 10 | intron 5 + (370-371) | gttgtcgaacagctgtctca (TA) gctgacatcctccctgataa | 785 | | |
| GSTA4 | 10 | intron 5 + (370-371) | gttgtcgaacagctgtctca gctgacatcctccctgataa | 786 | \ | |
| NDUFA1 | 1 | 5′flanking − 1437 | agggctaaaaatcctgatta T/A acctaccttgaagcttttaa | 787 | | |
| NDUFA1 | 2 | intron 2 + 3071 | aataaaagtacatggcatat C/A tttgatgggaacagacttgt | 788 | | |
| NDUFA1 | 3 | 3′flanking + 1218 | aactccatgtgtataaagca A/G caccacagatgacacttcca | 789 | | |
| NDUFA1 | 4 | 3′flanking + 1411 | ggattgtgccatcccttgat C/T/G ggcaatgaccttttactttt | 790 | | |
| NDUFA1 | 5 | 3′flanking + 1411 | ggattgtgccatcccttgat C/T/G ggcaatgaccttttactttt | 791 | | |
| NDUFA2 | 1 | intron 2 + 1087 | aacatacaaaaattagccgg A/G tatggtggcgggcacctgta | 792 | | |
| NDUFA2 | 2 | intron 2 + 1089 | catacaaaaattagccggat A/G tggtggcgggcacctgtaat | 793 | | |
| NDUFA2 | 3 | intron 2 + 1356 | ttccctgaaacaacccattg T/C ggccatccagaatcagccaa | 794 | | |
| NDUFA2 | 4 | 3′flanking + 467 | cacagcctcatgggtcagcc C/T actccagagggtgcattccc | 795 | | |
| NDUFA2 | 5 | 3′flanking + 744 | ggaagcaggggccctggcca C/T agccgctggcagtaagcagg | 796 | | |
| NDUFA2 | 6 | 3′flanking + (844-845) | tatagtctacaaagaatgaa (ACAC) aaagatcataacaatagcta | 797 | | |
| NDUFA2 | 6 | 3′flanking + (844-845) | tatagtctacaaagaatgaa aaagatcataacaatagcta | 798 | | |
| NDUFA3 | 1 | intron 2 + 2656 | tccctgctgccctcccctgc G/A cactttatcttccctttgcc | 799 | | |
| NDUFA3 | 2 | exon 4 + 241 | agggccccagcctggagtgg G/G tgaagaaactgtgagcacct | 800 | | |
| NDUFA3 | 3 | 3′flanking + 1019 | tccttacctgcactggcacc A/G gctctggagccccagtccct | 801 | | |
| NDUFA5 | 1 | intron 3 + 2155 | agactctagcatggtacctg G/G aacataaggttccttagaaa | 802 | | |
| NDUFA5 | 2 | intron 3 + 2493 | ggcatattgctagttttctc G/T gtctcaatttcatcatctat | 803 | | |
| NDUFA5 | 3 | intron 3 + 2712 | acaaattttgaactgttcac C/T taacacaggctttttctgaa | 804 | | |
| NDUFA5 | 4 | 3′flanking + 1298 | aggtatctaaaaggtattgc A/C atttggtcattggttctttc | 805 | | |
| NDUFA5 | 5 | intron 3 + (30-31) | aagtcagttttgttgtcttg (GATTTGTGGTATCCAG) tgtaa | 806 | | |
| | | | catttaaccaaaaaa | | | |
| NDUFA5 | 5 | intron 3 + (30-31) | aagtcagttttgttgtcttg tgtaa | 807 | | |
| | | | catttaaccaaaaaa | | | |
| NDUFA5 | 6 | intron 3 + (427-428) | attaagtagcagttaataaa AG/Δ tctagactgctgattcatac | 808 | | |
| NDUFA5 | 7 | intron 3 + (4733-4734) | tataggaattttaaaatata TA/Δ ggatattgaaacattcagtt | 809 | | |
| NDUFA6 | 1 | 5′flanking − 1148 | tttataatttatatatgtta C/T gtgctttcttttgtatagct | 810 | | |
| NDUFA6 | 2 | 5′flanking − 363 | actaccaaggagcgcggcgg G/A cagccggatagcaggacgct | 811 | | |
| NDUFA6 | 3 | exon 1 + 26 | ggggagcggcgtccgccaag C/T tacttctaccgccagcacct | 812 | | |
| NDUFA6 | 4 | intron 1 + 1318 | attcagcagtttgaaaacat A/G atgtttgcctggcagaatac | 813 | | |
| NDUFA6 | 5 | intron 2 + 562 | agttaaagaatctgaaaagt G/C tcagaaatgatttaccctga | 814 | | |
| NDUFA6 | 6 | 5′flanking − (861-862) | ctgtaaaatggggatgctga (T) ggtacctacctgacctatga | 815 | | |
| NDUFA6 | 6 | 5′flanking − (861-862) | ctgtaaaatggggatgctga ggtacctacctgacctatga | 816 | | |
| NDUFA7 | 1 | 5′flanking − 731 | accaaccaaaggtctatcaa A/G ggggtgtcctctttgcaccc | 817 | | |
| NDUFA7 | 2 | 5′flanking − 434 | aaagggaaccatcagaaccc C/T gtgatgaaatgagaatcggc | 818 | | |
| NDUFA7 | 3 | 5′flanking − 395 | gctcccggattccggctggc A/G ggggttagggcagggtagag | 819 | | |
| NDUFA7 | 4 | 5′flanking − 100 | agaggagtcacgtgcttcgg G/A gagagcctttataggacgtt | 820 | | |
| NDUFA7 | 5 | intron 1 + 92 | tcacctccctcctaagccgg G/A acccttcgctctccccgaat | 821 | | |
| NDUFA7 | 6 | intron 1 + 133 | ctccctgggaacccccagct A/C gtcaccccttcagcccggga | 822 | | |
| NDUFA7 | 7 | intron 1 + 136 | cctgggaacccccagctagt C/G accccttcagcccgggaccc | 823 | | |
| NDUFA7 | 8 | intron 2 + 89 | tcctttagacccctgaaacg G/C agggctgacatcctgccacc | 824 | | |
| NDUFA7 | 9 | exon 3 + 196 | gccgccgggaatctgtgccc C/G cttccatcatcatgtcgtcg | 825 | | |
| NDUFA7 | 10 | intron 3 + 4203 | gcctccacccctggggcgcc T/G cctccatcaccccaccctcc | 826 | | |
| NDUFA7 | 11 | intron 3 + 4604 | gggccttgtgtacgctggag A/G ccaaaagtgggaagggagga | 827 | | |
| NDUFA7 | 12 | 5′flanking − (1360-1353) | agggtccagggtcccctgct (CAGAGGCT) aacactggccg | 828 | | |
| | | | aagagaaag | | | |
| NDUFA7 | 12 | 5′flanking − (1360-1353) | agggtccagggtcccctgct aacactggccgaagagaaag | 829 | | |
| NDUFA7 | 13 | 5′flanking − (1240-1239) | tgatagagccctgatccacc CA/Δ ctctctgaaacttctttgct | 830 | | |
| NDUFA7 | 14 | intron 2 + (4142-4143) | cattttgtgactgaggtgac AG/Δ gggcccacagcggggccatg | 831 | | |
| NDUFA8 | 1 | intron 1 − 75 | tttgtgttctctattctgac C/T ctttatccagaagtgagcag | 833 | | |
| NDUFA8 | 2 | intron 2 + 790 | caaacctagacaaagtgtgc C/T attgctcaggcctgagatgg | 834 | | |
| NDUFA8 | 3 | intron 2 + 900 | ttcaggagataaaaagctct G/A attgctcaggcctgagatgg | 835 | | |
| NDUFA8 | 4 | intron 2 + 3837 | gaagttgtcttgtaagtgag A/G taagaatatgtactcacata | 836 | | |
| NDUFA8 | 5 | intron 2 + 3942 | tcattgttttgcaaagagat G/T cccctaacccagctttcttt | 837 | | |
| NDUFA8 | 6 | intron 3 − 66 | gaggagacaccaggaggcgc A/G ttgatggttacagattcctc | 838 | | |
| NDUFA8 | 7 | 3′untranslated + 520 | tttatttctggaccaagtaa A/G gatgggtccgtggcccacac | 839 | | |
| NDUFA8 | 8 | 3′flanking + 367 | gtcatacaaggggagcctcc A/G ggatagaagtgcagaaactt | 840 | | |
| NDUFA8 | 9 | 3′flanking + 777 | attcttttttcactactagg C/T tgtttcctccacatctgact | 841 | | |
| NDUFA8 | 10 | 3′flanking + 1053 | aaagaaaaagcactgtgtga T/A ctgccatggccgcttctgca | 842 | | |
| NDUFA8 | 11 | 3′flanking + 1190 | gattctctaatgaaaaataa G/T acttttttttgcattttttt | 843 | | |
| NDUFA8 | 12 | intron 2 + (449-453) | ggtcattgtgcatgatacttaa (GTAAA) aaaaaactaagctgtgtaat | 843 | | |
| NDUFA8 | 12 | intron 2 + (449-453) | ggtcattgtgcatgatacttaa aaaaaactaagctgtgtaat | 844 | | |
| NDUFA8 | 13 | intron 2 + (707-708) | ctcattttggaaagactctc (A) accttgctgtaccaaaaatg | 845 | | |
| NDUFA8 | 13 | intron 2 + (707-708) | ctcattttggaaagactctc accttgctgtaccaaaaatg | 846 | | |
| NDUFAB1 | 1 | intron 1 + 8451 | cagcaccctgtagaggcctc G/A ggatgctgaagatgccatga | 847 | | |
| NDUFAB1 | 2 | intron 1 + 8495 | gacacaggcattctgcagac G/A ctagacaattttagtggcag | 848 | | |
| NDUFA9 | 1 | 5′flanking − 807 | gatggctctttgtagaacaa T/G gcagattctcaaaggtgacc | 849 | | |
| NDUFA9 | 2 | 5′flanking − 769 | accacagttaaagaaaaaat T/C acaagccattgcgctagaga | 850 | | |
| NDUFA9 | 3 | 5′flanking − 353 | cacaccctattttggtttct C/G ttctccacttttcccctcgt | 851 | | |
| NDUFA9 | 4 | 5′flanking − 322 | ttcccctcgttcttgtcccc C/T cttttctctctcctgggccc | 852 | | |
| NDUFA9 | 5 | intron 1 + 447 | attcatatgagcacaatgga A/G atgataatattacaatacca | 853 | | |
| NDUFA9 | 6 | intron 1 + 1039 | ggcttgatgttcagcctgag G/A caagaattaggagtgtttag | 854 | | |
| NDUFA9 | 7 | intron 1 + 4010 | aatgtatccaaaagagattc T/G cattcctgccatatgaagaa | 855 | | |
| NDUFA9 | 8 | intron 3 + 49 | gacaaatataaattactaag G/A tcatttttaggagtgatagg | 856 | | |
| NDUFA9 | 9 | intron 3 + 107 | aatttcttcccagaatggac C/T aaaggcatcctctgttccca | 857 | | |
| NDUFA9 | 10 | intron 3 + 1183 | atctctggtaatattcatac A/G gattatttgtaatcccttta | 858 | | |
| NDUFA9 | 11 | intron 3 + 1395 | attcctagttctttgtccct C/T aagtttgttggtcaccttgt | 859 | | |
| NDUFA9 | 12 | intron 3 + 2363 | agaaaatagtcatgaatggc C/T ccaactaacactagtcttta | 860 | | |
| NDUFA9 | 13 | intron 3 + 2608 | gtcatttgattacctgagta A/C agtgtactgttacctgtttg | 861 | | |
| NDUFA9 | 14 | intron 4 + 561 | attttataaattctttgatg A/C cttgggggtcttattcaact | 862 | | |
| NDUFA9 | 15 | intron 4 + 860 | attgtgtagagtaatgacag C/T agagctgtcaacttttttaa | 863 | | |
| NDUFA9 | 16 | intron 4 + 879 | gcagagctgtcaactttttt A/T aaaaaataattttagcttaa | 864 | | |
| NDUFA9 | 17 | intron 4 + 893 | ttttttaaaaaaataatttt A/G gcttaaaaaaattaaaaatt | 865 | | |
| NDUFA9 | 18 | intron 4 + 1090 | atcattgctgtttaaaagtt T/C aagtagtgtgaatttcagta | 866 | | |
| NDUFA9 | 19 | intron 4 + 1188 | aaccaatccttttatttttt A/T tcttccagaaactttgattt | 867 | | |
| NDUFA9 | 20 | intron 5 + 161 | gggtgtgtgtgatgttttga C/T gttttgattgattgccttct | 868 | | |
| NDUFA9 | 21 | intron 5 + 373 | ctttctcaccccttgcactg C/T agtggttttgtgccactctt | 869 | | |
| NDUFA9 | 22 | intron 5 + 457 | gccagggaagatgcctattc A/C cacagtgcttatgctccttt | 870 | | |
| NDUFA9 | 23 | intron 5 + 3113 | gatttttctccttcttcaat G/A taagcttcccttaaaataaa | 871 | | |
| NDUFA9 | 24 | intron 5 + 3339 | tctaaactcaaaacaggttt G/A tttggttattgtttaggctg | 872 | | |
| NDUFA9 | 25 | intron 6 + 414 | tatagttttgccttttccag G/C atattacatatatggttaga | 873 | | |
| NDUFA9 | 26 | intron 6 + 518 | ctttcatttcttttcatagc T/C tggtagctcatttctttata | 874 | | |
| NDUFA9 | 27 | intron 6 + 974 | ggattatgcgtacttggaaa A/G tacttggatagcggtgatta | 875 | | |
| NDUFA9 | 28 | intron 7 + 368 | acattaattttgatggagta T/G cacaatgcctccagaggctg | 876 | | |
| NDUFA9 | 29 | intron 8 + 954 | gcatgcaatcagttatatag T/C ctagataagaattacaattc | 877 | | |
| NDUFA9 | 30 | intron 8 + 1253 | tcctcttgaaattgtagata G/T gtatctacacatttctcatc | 878 | | |
| NDUFA9 | 31 | intron 8 + 11608 | gaaaagatagatgtataaat G/A accaaaaattcgtgaagaaa | 879 | | |
| NDUFA9 | 32 | intron 8 + 11930 | ctacaaatatattctaaatg C/T gtaatcatggataagtacaa | 880 | | |
| NDUFA9 | 33 | intron 9 + 1998 | tgtttttcaagcctttaaac G/A gctgtggaaccctgtgctca | 881 | | |
| NDUFA9 | 34 | intron 9 + 2238 | ccagctacttgggaggctga A/G gtgggaggatcacttgagcc | 882 | | |
| NDUFA9 | 35 | intron 9 + 2885 | acagcggtctgtcttcctgc A/G gttctcataggctagattac | 883 | | |
| NDUFA9 | 36 | intron 10 + 801 | tacactaaagtgtctcttac G/A tttatacttgagaaagtgtt | 884 | | |
| NDUFA9 | 37 | intron 10 + 910 | tgcagactttcaggtgggta G/C gatgagggattgctgctgct | 885 | | |
| NDUFA9 | 38 | intron 10 + 1180 | aaaactgagtcagaacgccc G/A tgctcagaaaaacagggcgt | 886 | | |
| NDUFA9 | 39 | intron 10 + 554 | gtgccagcacttaggaatta T/G gaccttctaatgaagttctt | 887 | | |
| NDUFA9 | 40 | 5′flanking − (1129-1128) | taaacagtaggggcaagata (TC) gagtggaaacagccaagatt | 888 | | |
| NDUFA9 | 40 | 5′flanking − (1129-1128) | taaacagtaggggcaagata gagtggaaacagccaagatt | 889 | | |
| NDUFA9 | 41 | 5′flanking − 341 | tggtttctcttctccacttt T/Δ cccctcgttcttgtcccccc | 890 | | |
| NDUFS1 | 1 | 5′flanking − 3 | tcctagggggtcgtcgtggt C/G cagacagtttagcagaacag | 891 | | |
| NDUFS1 | 2 | intron 1 − 445 | gtgttagcaatggctcacgc T/C tctgtttgttgtccttgttt | 892 | | |
| NDUFS1 | 3 | intron 1 + 470 | tttgttgtccttgtttgttt G/T gtccattgaccacgttggac | 893 | | |
| NDUFS1 | 4 | intron 1 + 502 | acgttggacagcattttttt A/G ttcctttaactaacgggaaa | 894 | | |
| NDUFS1 | 5 | intron 1 + 557 | ttttgaaaagttagcccagg A/G ttgcattgcaaataacaaaa | 895 | | |
| NDUFS1 | 6 | intron 1 + 5218 | tatctcagaatatctcagga A/G catttagtagacagctatgc | 896 | | |
| NDUFS1 | 7 | intron 3 + 1371 | aagccctaaaatagatagtg T/G caatgggaatgaaaacaaga | 897 | | |
| NDUFS1 | 8 | intron 5 + 414 | ttttgaaacgaggtctcact A/G tgttgtccaggctgggcttg | 898 | | |
| NDUFS1 | 9 | intron 10 + 812 | gagtgcggtggcgcgatctc G/A atctcgggtcactgcagcct | 899 | | |
| NDUFS1 | 10 | intron 11 + 233 | ggaggccaaggcaggcagat C/T gcctaagtgcaggagtttga | 900 | | |
| NDUFS1 | 11 | intron 11 + 283 | ggccaaacatggcgaacccc G/A tctctactaaaaatacaaaa | 901 | | |
| NDUFS1 | 12 | intron 11 + 585 | ctgtatgtcttaattttaaa G/T taaatttgcattttatatat | 902 | | |
| NDUFS1 | 13 | intron 12 + 1251 | gcaccactgtttaatgctag A/G attcgaaagaggttggtaat | 903 | | |
| NDUFS1 | 14 | intron 13 + 5159 | attacttttagaaaacgtgt T/C ttagctgatactcaggcata | 904 | | |
| NDUFS1 | 15 | intron 14 + 250 | aaaaattgttatattagtta C/T acccttggttcaaaaatgca | 905 | | |
| NDUFS1 | 16 | intron 14 + 550 | gataaagtctcactatgttg C/T ccaggttgatctcaaactcc | 906 | | |
| NDUFS1 | 17 | intron 14 + 2429 | ctgaaaatacaaaaattagc C/T gggtgtggtggcatgtgcct | 907 | | |
| NDUFS1 | 18 | intron 14 + 2530 | ttacagtgagccgagatcac G/T ccactgcgctccagcctggg | 908 | | |
| NDUFS1 | 19 | intron 14 + 2659 | acacatttaattttttacat T/C gaaaatactgcagttatggt | 909 | | |
| NDUFS1 | 20 | intron 16 + 150 | agaaaacatgtattcagaaa C/T aggaattcaaggttacagtg | 910 | | |
| NDUFS1 | 21 | intron 18 + 279 | cactgtgtagcaatttatgg T/C gaattttccaaagtggcaaa | 911 | | |
| NDUFS1 | 22 | 3′flanking + 182 | tctaggataattataattaa T/A aataatcatagtaacaatgg | 912 | | |
| NDUFS1 | 23 | intron 11 + 3226 | aaatgtattgtctgtgcttt T/Δ aacattttgtaatagtaaat | 913 | | |
| NDUFS3 | 1 | 5′flanking − 194 | tctgccacaaggagctagga C/T cacgctcacctcacgatttc | 914 | | |
| NDUFS3 | 2 | intron 1 + 46 | cggggtcaggcgcagcggcg T/C gcccagtgcagagagctcct | 915 | | |
| NDUFS3 | 3 | intron 6 − 439 | aaagctgtgtcaaatgtact G/A ctttagatctggactgtgaa | 916 | | |
| NDUFS3 | 4 | intron 6 − 280 | ggtgggtgagcagtcagttc G/A gagctcctgatgtgggagtg | 917 | | |
| NDUFS4 | 1 | 5′flanking − 439 | aactgaatacagccctgtcc T/A gagggcttgcaaagtgaatc | 918 | | |
| NDUFS4 | 2 | intron 1 + 1829 | gaaaaaaaatcttaatgcca G/T ggaagacgttttttaaatac | 919 | | |
| NDUFS4 | 3 | intron 1 + 2057 | attaatgggaaaatctacat C/G taaaattcattttattgtaa | 920 | | |
| NDUFS4 | 4 | intron 1 − 521 | ttcattttaactaattttat T/G tctcccattttgtgaatggg | 921 | | |
| NDUFS4 | 5 | intron 1 − 1259 | ataaaattatgatattatta G/A tactaatatagccagccata | 922 | | |
| NDUFS4 | 6 | intron 1 − 1174 | aatatatataattataggaa T/C ctcagagtagcaaccatggt | 923 | | |
| NDUFS4 | 7 | intron 1 + 10682 | cacaatataggcacaaactt A/C ctaccaaagcactaacaagt | 924 | | |
| NDUFS4 | 8 | intron 1 + 12299 | tttactatatagatatatgg A/T atagactatagagtatctct | 925 | | |
| NDUFS4 | 9 | intron 1 + 12550 | accaaataaggtattatgca G/A gctcatctttttatataaga | 926 | | |
| NDUFS4 | 10 | intron 1 + 18801 | ggaaagacttgctttgccag T/C gtatccgaaacctctgttat | 927 | | |
| NDUFS4 | 11 | intron 1 + 19888 | tcgcacagctgagaagagca A/G ggggctggttttcagtaccc | 928 | | |
| NDUFS4 | 12 | intron 1 + 20178 | agaaaagatgagtataattc G/A tctaacttacccattcttaa | 929 | | |
| NDUFS4 | 13 | intron 1 + 23016 | ctactctgtgaaagtaaggt T/A atgttgaacaagtaaattaa | 930 | | |
| NDUFS4 | 14 | intron 1 + 23124 | actttctttggagatggagt T/A ccagcagttgggaatgtaat | 931 | | |
| NDUFS4 | 15 | intron 1 + 766 | tgtgatgatttttttttttt T/Δ ggctgtattaaccttccatt | 932 | | |
| NDUFS4 | 16 | intron 1 + 1261 | tttctttctctttttttttt T/Δ gagatacattctcactctga | 933 | | |
| NDUFS5 | 1 | intron 1 + 388 | ccaaacatagccagcacttc C/T ggctgtaactccgggctgtt | 934 | | |
| NDUFS5 | 2 | intron 1 − 13082 | agtgagccgagattgcacca G/A tgcattccagcctgggcaac | 935 | | |
| NDUFS5 | 3 | intron 1 − 12905 | gttttcaacaaaggactcca G/T agtagtagagaagtttctgt | 936 | | |
| NDUFS5 | 4 | intron 1 − 12564 | attttcatcacacctcaact T/G aaggtataacagccttaaga | 937 | | |
| NDUFS5 | 5 | intron 1 − 12561 | ttcatcacacctcaacttaa G/A gtataacagccttaagaatg | 938 | | |
| NDUFS5 | 6 | intron 1 − 10561 | aacaatgtggtatagtgggg C/G gggtggtgagcaggtgtcat | 939 | | |
| NDUFS5 | 7 | intron 1 − 9065 | cctgatgctcctggctccag G/A gtagaccttttccctttaga | 940 | | |
| NDUFS5 | 8 | intron 1 − 8871 | tcaccacgtgtctgtagata T/C aggaccgcagaccttcgctt | 941 | | |
| NDUFS5 | 9 | intron 1 − 7312 | aaatccttggcttctagaat G/T ggtcactgatggtatataat | 942 | | |
| NDUFS5 | 10 | intron 1 − 6827 | aacctctgcctccccgattc A/G cgccattctcctgcctcagc | 943 | | |
| NDUFS5 | 11 | intron 1 − 6725 | agtagagacggggtttcacc G/A tgttagccagcatggtctcg | 944 | | |
| NDUFS5 | 12 | intron 1 − 6631 | aggcgtgagccactgcgccc G/A gcctagaccttcttcttata | 945 | | |
| NDUFS5 | 13 | intron 1 − 6531 | cccaacagctcccaatgtaa A/G acagatctattaatattctg | 946 | | |
| NDUFS5 | 14 | intron 1 − 6346 | gcaacagatcttgacctata T/C cccatagggtacagctgagg | 947 | | |
| NDUFS5 | 15 | intron 1 − 6327 | atcccatagggtacagctga G/C gactttaatcagaaaaggag | 948 | | |
| NDUFS5 | 16 | intron 1 − 6122 | tagccttgcttttactctac T/C gttcctcccaaatcacaccc | 949 | | |
| NDUFS5 | 17 | intron 1 − 2512 | acaaactcttaatgcgaatt T/C tgcagatcaaagtgggctta | 950 | | |
| NDUFS5 | 18 | intron 1 − 1945 | tttaatctcctttaaatttc G/A caatttcacaacctagggta | 951 | | |
| NDUFS5 | 19 | intron 2 + 75 | tttttttttttttttgagac G/A aagtctcactcttgtcccct | 952 | | |
| NDUFS5 | 20 | intron 2 + 148 | ctgtagcctctgcctcccag G/A ttcaggcgattcgcgtacct | 953 | | |
| NDUFS5 | 21 | 3′flanking + 150 | cagattcaagtggttctcct G/G cctcagcctcccaagtagct | 954 | | |
| NDUFS5 | 22 | intron 1 − (10682-10681) | attataaacactaaacaaac AT/Δ gtgtggtctctttagagggg | 955 | | |
| NDUFS5 | 23 | intron 1 − 10272 | aggaacaagtgactaccctg A/Δ aaaaagaagagatgaaacaa | 956 | | |
| NDUFS5 | 24 | intron 1 − 2069 | accagacagagttcccttta C/Δ ttgttttcctgtggcaaaga | 957 | | |
| NDUFS6 | 1 | intron 1 + 26 | ggccgctgggtacaggatgc A/C ccttcctccagccgcacctc | 958 | | |
| NDUFS6 | 2 | intron 2 + 1078 | ggatcatggtggtggagagg G/A gcttgtgtctggtgggtttg | 959 | | |
| NDUFS6 | 3 | intron 2 + 1260 | cagttgtcgagtaagtggtg T/C atagggtaagtgctctttct | 960 | | |
| NDUFS6 | 4 | intron 2 + 1413 | caaaggagctcatggcattg C/T gaatgggacatttcttccgt | 961 | | |
| NDUFS6 | 5 | intron 2 + 1568 | tggagaaggggaggtttctc T/C tagtgtggatgcggtatggt | 962 | | |
| NDUFS6 | 6 | intron 2 + 1692 | gaccgtggtgacggaggttt C/T ctgggcatcgatgggtggtt | 963 | | |
| NDUFS6 | 7 | intron 2 + 6488 | tagcttaaataattattggc A/G ttcatgttcagaatgcctga | 964 | | |
| NDUFS6 | 8 | intron 2 + 6563 | tttaaacttttattttaaat G/A tccatgaatggggtcggtat | 965 | | |
| NDUFS6 | 9 | intron 2 + 6740 | aaagatttaaacctacatat C/T tttatgcccaatcatttgat | 966 | | |
| NDUFS6 | 10 | intron 2 + 6832 | gcgaggactcatttttacag A/T ggttggacacttcactgtgt | 967 | | |
| NDUFS6 | 11 | intron 2 + 7054 | ttcactgccggagcttggcc G/A tgtgaacccggagccgggct | 968 | | |
| NDUFS6 | 12 | intron 2 + 7186 | ggtcagggtcacccttgagc T/C gcgcacactaaatgacggga | 969 | | |
| NDUFS6 | 13 | intron 2 + 7225 | gagggcatcccgcgtcagtc G/A ccagtgtcgaggcgtcagca | 970 | | |
| NDUFS6 | 14 | intron 2 + 7810 | cttccactctggggcgggga C/T gctgtagaaggagcacaaag | 971 | | |
| NDUFS6 | 15 | intron 2 + 11080 | gtaactgttcagtgctttct C/T ctttggatttcatgtaaatc | 972 | | |
| NDUFS6 | 16 | intron 2 + 11657 | gggacagaacgatgtggtgg G/A gagaagagggcgtggcagag | 973 | | |
| NDUFS6 | 17 | intron 3 + 208 | cgaaaaccccctttcaactg T/C gaagtggtgggcggcatgtt | 974 | | |
| NDUFS6 | 18 | intron 3 + 1031 | ctagagtgggactgggcacc C/T ggcatgtcccctcctgggct | 975 | | |
| NDUFS6 | 19 | 3′flanking + 270 | gcttcagagagccaaggtgg G/C tcttgaggtgcatagtgaag | 976 | | |
| NDUFS8 | 1 | 5′untranslated − 45 | agtgtagcctccgcctcccg A/C ttgactggcctgcttggcaa | 977 | | |
| NDUFS8 | 2 | intron 1 + 163 | aggtgcagcggggagccggc T/C ctcagggcgcatgcgccgcc | 978 | | |
| NDUFS8 | 3 | intron 3 + 123 | tctctgagcctgtttccact T/C ttaaaatgattatggtgatg | 979 | | |
| NDUFS8 | 4 | intron 6 − 505 | aggcaaggcaggccgggcac G/A gtggctcacgcttgtaatcc | 980 | | |
| NDUFS8 | 5 | 3′flanking + 491 | ggccctgagctggcctgcgt C/A cagccacatcctctttcctg | 981 | | |
| NDUFS8 | 6 | 3′flanking + 693 | ttcacttcatttgcagtgag G/A aaaccagctccgagaggtga | 982 | | |
| NDUFS8 | 7 | 3′flanking + 1267 | ttttcccagacgtaaccgcc G/A tcagagcgtggcatggagcc | 983 | | |
| NDUFS8 | 8 | 3′flanking + 1362 | cgctgggttctttcccttac C/T gtggtctcccaggcacttac | 984 | | |
| NDUFS8 | 9 | 3′flanking + 1449 | tgtcagaacaggcctatggc G/A cccaaccacaagtcccccaa | 985 | | |
| NDUFS8 | 10 | 3′flanking + 1572 | cagccccacaggcctgtgct C/A gctgtgtggggcttagggat | 986 | | |
| NDUFS8 | 11 | 3′flanking + (783-784) | cagagaccttgacccccccc (G) atctaccatcatttccaaaa | 987 | | |
| NDUFS8 | 11 | 3′flanking + (783-784) | cagagaccttgacccccccc atctaccatcatttccaaaa | 988 | | |
| NDUFB3 | 1 | 5′flanking − 1439 | ttaaaagttgacttttttct G/A ccgggcacggtggctcacgc | 989 | | |
| NDUFB3 | 2 | 5′flanking − 1436 | aaagttgacttttttctgcc G/A ggcacggtggctcacgcctg | 990 | | |
| NDUFB5 | 1 | 5′flanking − 213 | ggcggatgaaactctcctac A/C aagaagggccaaaccggccg | 991 | | |
| NDUFB5 | 2 | intron 1 + 6288 | ggggatgttgattacctagg T/C cagtaaagtaaagaaggcat | 992 | | |
| NDUFB5 | 3 | intron 1 − 1581 | cttctgggccactgtatcct A/G tttctttcccttgttaccct | 993 | | |
| NDUFB5 | 4 | intron 1 − 1487 | ccctcttagaccgtatatag T/G tctagcataggatctgcaca | 994 | | |
| NDUFB5 | 5 | intron 2 + 556 | ttgtctggaccatctgccac G/A gtagataaagctctgaatca | 995 | | |
| NDUFB5 | 6 | intron 3 + 467 | ggcgccatcgcactccagcc C/T gggcaacagagtgagactct | 996 | | |
| NDUFB5 | 7 | intron 4 + 497 | agtgagactctgtccccccc C/G caaaaaaaaactataatcct | 997 | | |
| NDUFB5 | 8 | exon 5 + 397 | atgatagtcctgaaaagata T/C atgaaagaacaatggccgtc | 998 | | |
| NDUFB5 | 9 | intron 1 + (231-215) | attagcatttctaaaacgtt GTT/Δ attcaccatcccaattaatg | 999 | | |
| NDUFB7 | 1 | intron 1 + 68 | cctgaacacctggcacccca G/A ggctggcaccccagggctgg | 1000 | | |
| NDUFB7 | 2 | intron 2 + 266 | gggctctctaggggcctgtt T/C gatggggacagggcaggtgg | 1001 | | |
| ABCA1 | 1 | 5′flanking − 278 | gggcccgggcgggggaaggg G/C acgcagaccgcggaccctaa | 1002 | | |
| ABCA1 | 2 | 5′flanking − 99 | acataaacagaggccgggaa G/C ggggcggggaggagggagag | 1003 | | |
| ABCA1 | 3 | intron 1 + 159 | gcggtgttaaatggggagac G/T atgtcctagtacgagctctg | 1004 | | |
| ABCA1 | 4 | intron 1 + 506 | gaattggctatatgctcccc G/C ggactggagcggcacagtcc | 1005 | | |
| ABCA1 | 5 | intron 1 + 5897 | gtacaaaaccctttagcttt T.G gcaaacctcctttaagaccc | 1006 | | |
| ABCA1 | 6 | intron 1 + 5929 | ttaagacccgatttaaatgc C/T tccctcctcatgaagctctt | 1007 | | |
| ABCA1 | 7 | intron 1 + 5962 | aagctcttctggatccactc T/C ttcccatcactaagttgaaa | 1008 | | |
| ABCA1 | 8 | intron 1 + 5985 | cccatcactaagttgaaagt A/C agatccccttctctttactt | 1009 | | |
| ABCA1 | 9 | intron 1 + 11416 | ttacagtgccctttatagga G/A agaaagaagaaattgtgtct | 1010 | | |
| ABCA1 | 10 | intron 1 + 11935 | tctctgtggagcaaatagag G/A gctgtctgacacttggttcc | 1011 | | |
| ABCA1 | 11 | intron 1 + 12281 | gaatgtttgatttgtgaaaa T/A cttaataacagtagtttttt | 1012 | | |
| ABCA1 | 12 | intron 1 + 12924 | gtgctgacaatcttatactc T/C aggttgaacctccggggaag | 1013 | | |
| ABCA1 | 13 | intron 1 + 13002 | gagcctcaatcacagattct C/G tctagctcacatgaagttaa | 1014 | | |
| ABCA1 | 14 | intron 1 + 17715 | ggagcatgactttgtggaag C/T ctctcctcttccacccagag | 1015 | | |
| ABCA1 | 15 | intron 1 + 17848 | gagggctgactgtcaccctt T/C gataggagcccagcactaaa | 1016 | | |
| ABCA1 | 16 | intron 1 + 21384 | gtgggtgggaggaattggag G/C aggaagcttgcctaagtgtg | 1017 | | |
| ABCA1 | 17 | intron 1 + 22145 | gtagcttctaaatcaacgaa C/G tgattcctggagagcagctt | 1018 | | |
| ABCA1 | 18 | intron 1 + 23063 | ggaggcacctgtgaaaccaa G/A cggagtaggggggcggtgtg | 1019 | | |
| ABCA1 | 19 | intron 1 + 23131 | agtgtgcatatgtgctgacc G/A tgggagcttgtttgtcggtt | 1020 | | |
| ABCA1 | 20 | intron 2 + 156 | ggacacaggactgtgtggtc T/C ggatatggcatgtggcttat | 1021 | | |
| ABCA1 | 21 | intron 2 + 384 | gctgtgggtgaagtgagtta A/G tggccccactcttagagatc | 1022 | | |
| ABCA1 | 22 | intron 2 + 1081 | agtgcagccaaaattgcaaa G/A tcataccattcaaattaata | 1023 | | |
| ABCA1 | 23 | intron 2 + 2801 | aagaaaagtgatttatttca A/G gttgctgatgcttagattgt | 1024 | | |
| ABCA1 | 24 | intron 2 + 2830 | tgcttagattgttagagttg C/G aaagatctggcttgcatctt | 1025 | | |
| ABCA1 | 25 | intron 2 + 2856 | tctggcttgcatcttgtaca A/G ctgacagaactggggctcag | 1026 | | |
| ABCA1 | 26 | intron 2 + 3187 | tgatagctgttgcctgcagc A/G tacggacgttcattgcgcag | 1027 | | |
| ABCA1 | 27 | intron 2 + 3190 | tagctgttgcctgcagcata C/T ggacgttcattgcgcagttc | 1028 | | |
| ABCA1 | 28 | intron 2 + 3194 | tgttgcctgcagcatacgga C/T gttcattgcgcagttcctgt | 1029 | | |
| ABCA1 | 29 | intron 2 + 3204 | agcatacggacgttcattgc G/A cagttcctgtctcctgagat | 1030 | | |
| ABCA1 | 30 | intron 2 + 3401 | acataaagcctgtgtgctgc T/C gccaggaagactagaaacgc | 1031 | | |
| ABCA1 | 31 | intron 2 + 13927 | gtcaccacatacctggcact A/G tgctaaggctgggaatgcag | 1032 | | |
| ABCA1 | 32 | intron 3 + 4163 | ccagcccacttcatcttacc G/A tagttacctccttagagtat | 1033 | | |
| ABCA1 | 33 | intron 3 + 4262 | tgtcaaagaggaactaagga T/C gccagggactttctgcttag | 1034 | | |
| ABCA1 | 34 | intron 3 + 4306 | ccctctcatcacttctccaa C/T gctggtatcatgaaccccat | 1035 | | |
| ABCA1 | 35 | intron 5 + 240 | gacagaagaaaagtccccag G/A gaagaatactacagacttgg | 1036 | | |
| ABCA1 | 36 | intron 5 + 490 | gatgggcatttgaacttgtt G/A tctttaaaaagtgaaatctt | 1037 | | |
| ABCA1 | 37 | intron 5 + 583 | tatctggggagtgggcattt T/G ctgactgaggcattggctgc | 1038 | | |
| ABCA1 | 38 | intron 5 + 1051 | ggctacaaaactgtgctttc C/T ttgggcagtaaaagaggcaa | 1039 | | |
| ABCA1 | 39 | intron 5 + 3051 | tagagaacaagtctaattct G/A ttttccttgaaatagtcgaa | 1040 | | |
| ABCA1 | 40 | intron 5 + 3127 | aagtccatgattttttaggc A/G aaatggcctcctttcctctt | 1041 | | |
| ABCA1 | 41 | intron 5 + 5924 | ctttctttcacaaaattgcc C/T cccagagctttctggaaggg | 1042 | | |
| ABCA1 | 42 | intron 5 + 6831 | ccagtccctcagccttgcca T/C tgcttatgctggtctggaaa | 1043 | | |
| ABCA1 | 43 | intron 5 + 12678 | gctcaccgctctgctcaccc G/C accctctggccatctcctct | 1044 | | |
| ABCA1 | 44 | intron 5 + 14214 | cagcttggtcccagaggcct G/A gacctgggtcccagaggtcc | 1045 | | |
| ABCA1 | 45 | intron 5 + 14257 | gctggttccccggcttggtc C/T cagaggcctggatgtgtggc | 1046 | | |
| ABCA1 | 46 | intron 5 + 18078 | cctaccacaccatgcacgtg C/T acagccaagggttgttgact | 1047 | | |
| ABCA1 | 47 | intron 5 + 18795 | ctgggctcttcctggacctg G/A ccagctaaaaggaaatctcc | 1048 | | |
| ABCA1 | 48 | intron 5 + 18948 | gcattggtggtactaagaac G/A catattccctatcctatagg | 1049 | | |
| ABCA1 | 49 | intron 5 + 19053 | ctcccccaacattaaaagtg T/C aagggatgcttattcaaatg | 1050 | | |
| ABCA1 | 50 | intron 5 + 19148 | ggcccaagaaactgcatttt C/A gcatgctccctaaatgaagc | 1051 | | |
| ABCA1 | 51 | intron 5 + 19229 | atgctaacagtgtagagtca C/T atgtgatgggaagcatcagg | 1052 | | |
| ABCA1 | 52 | intron 5 + 19405 | cttgctcaatttattctgtc T/C atataactcaatattactga | 1053 | | |
| ABCA1 | 53 | intron 5 + 19534 | catgtgaccctcttagctcc G/A cggattaactcctgtcctca | 1054 | | |
| ABCA1 | 54 | exon 6 + 474 | gaaaccttctctgggttcct G/A tatcacaacctctctctccc | 1055 | | |
| ABCA1 | 55 | intron 6 + 210 | gcaacctggcgtcatgggcc A/G gctggttaaaataaaattga | 1056 | | |
| ABCA1 | 56 | intron 6 + 334 | acagttctgaggcaataacc G/A tggttaagggttattgatct | 1057 | | |
| ABCA1 | 57 | intron 6 + 2288 | cttctttcaaagcttgtggt C/T cactggaccacgtatgaagt | 1058 | | |
| ABCA1 | 58 | intron 6 + 2322 | atgaagtagaatagtttagg T/C ccagaaaggcaattaagtaa | 1059 | | |
| ABCA1 | 59 | intron 6 + 2820 | gtgctttgatacattctgag T/G ttcagtaaagagacctgatg | 1060 | | |
| ABCA1 | 60 | exon 7 + 656 | tgagctttgtggcctaccaa G/A ggagaaactggctgcagcag | 1061 | | |
| ABCA1 | 61 | intron 7 + 416 | catcataaagatgacattgt G/A ggctgtcacagttggaaggc | 1062 | | |
| ABCA1 | 62 | intron 7 + 471 | agaccacactatttagctta C/T ttagtaataacattgcaaag | 1063 | | |
| ABCA1 | 63 | intron 7 + 504 | ttgcaaagaaaaattccgac G/A aagttttttcagcctaggaa | 1064 | | |
| ABCA1 | 64 | intron 7 + 679 | gctctggtgaaattcctctc G/C ctaccccaaacatcatcatt | 1065 | | |
| ABCA1 | 65 | intron 7 + 1740 | acaaatgctcaccctttcag G/T tggaatgattgaaattttgg | 1066 | | |
| ABCA1 | 66 | intron 7 + 2122 | tgattaaggtggctactacc A/G ggtgctttctgcatatctcg | 1067 | | |
| ABCA1 | 67 | intron 7 + 7753 | taggaattccaagctgtgaa T/C tttttactgaagctctttgg | 1068 | | |
| ABCA1 | 68 | intron 7 + 8973 | atggaaatttgtttatattg A/T ctacagattgccaatattat | 1069 | | |
| ABCA1 | 69 | intron 7 + 8976 | gaaatttgtttatattgact A/G cagattgccaatattattag | 1070 | | |
| ABCA1 | 70 | intron 7 + 11327 | ctaacaatcttatttccatt G/C agtccttataaaagaagtgg | 1071 | | |
| ABCA1 | 71 | intron 7 + 11738 | ctgacgtttaagggagaccg C/T gtaggtccctttgaggactg | 1072 | | |
| ABCA1 | 72 | intron 7 + 12295 | agtctgtaaattattgttct T/A ttttttctttagcttatgct | 1073 | | |
| ABCA1 | 73 | intron 8 + 387 | tagcaaggccaatcatttta C/G caacacacatgcttgctaac | 1074 | | |
| ABCA1 | 74 | intron 8 + 697 | ggaactgtctggtgtccccc A/T gcataggaagctgagccagg | 1075 | | |
| ABCA1 | 75 | intron 8 + 1312 | attgctctgcagatcccctc G/A cagccctctgtcccttgttc | 1076 | | |
| ABCA1 | 76 | intron 8 + 3036 | ctttatgtgggaagaaattt T/G tttttttgattggggagtgg | 1077 | | |
| ABCA1 | 77 | intron 8 + 3176 | aaatggcctggttctctgtc C/A cctttctgtctgtatgcctc | 1078 | | |
| ABCA1 | 78 | intron 8 + 3364 | ggcagaaggcaaagcttagg A/T cctagagagtgctggaccac | 1079 | | |
| ABCA1 | 79 | intron 8 + 3373 | caaagcttaggacctagaga G/A tgctggaccacgccactcac | 1080 | | |
| ABCA1 | 80 | intron 8 + 3581 | cagggatttattaatgattt C/A ttgtgaaatgtttggaaata | 1081 | | |
| ABCA1 | 81 | intron 8 + 3654 | agtgccggaatacatttgca T/C gtaagacagaccgctgcctg | 1082 | | |
| ABCA1 | 82 | intron 8 + 4715 | ggcagaggggtctcagaatc C/T gcatttccaacaatgtctcc | 1083 | | |
| ABCA1 | 83 | exon 9 + 936 | cgtattgtctgcgggcatcc C/T gagggaggggggctgaagat | 1084 | | |
| ABCA1 | 84 | intron 9 + 2309 | cccctcaagagtcagtttaa A/G tgttggtcatgttagttgtc | 1085 | | |
| ABCA1 | 85 | intron 9 + 2392 | atgggagggcttgtgcttca T/C gaaaacatttttccagatca | 1086 | | |
| ABCA1 | 86 | intron 10 + 228 | tggggatggggaggactggc A/G cagggctgctgtgatggggt | 1087 | | |
| ABCA1 | 87 | intron 10 + 319 | ttctgcggtccctggctccc C/T acctgactccaggtgaacaa | 1088 | | |
| ABCA1 | 88 | intron 11 + 377 | gaaagaagtgtgggagcaaa A/C gcatgatgttacatgtagac | 1089 | | |
| ABCA1 | 89 | intron 11 + 521 | agtgctctagagacaattgg G/A ttcaaatgtggagcaggctg | 1090 | | |
| ABCA1 | 90 | intron 11 + 2850 | ctctatacaatcattatgct G/C ccattgaaataataaataca | 1091 | | |
| ABCA1 | 91 | intron 11 + 2976 | ctccaattcggtagaaccag A/G gcttcatcttctctgtcgaa | 1092 | | |
| ABCA1 | 92 | intron 11 + 3056 | gtttgcagctgctgtttttc G/T ggcagcacatctgtgcaggc | 1093 | | |
| ABCA1 | 93 | intron 12 + 340 | ggcattatttgtgaaactta T/C ctaaaatcgaattcgggtcc | 1094 | | |
| ABCA1 | 94 | intron 12 + 381 | aattaaatttttgaaatttt A/G tattaaaaattatattagta | 1095 | | |
| ABCA1 | 95 | intron 14 + 1728 | caggctcagaggccttggcc C/T atcaccctggctcacgtgtg | 1096 | | |
| ABCA1 | 96 | exon 15 + 2040 | atgggcctggacaacagcat C/A ctctggtttagctggttcat | 1097 | | |
| ABCA1 | 97 | intron 15 + 1382 | cttttagacagaaaagttac G/A tgggatattatctcccacag | 1098 | | |
| ABCA1 | 98 | intron 15 + 1453 | tatataaggagaaaccagtt G/A aaattacctattgaagaaac | 1099 | | |
| ABCA1 | 99 | intron 15 + 1567 | ttctgcgtagttttgggtaa G/A tcacttatcttctttaggat | 1100 | | |
| ABCA1 | 100 | intron 15 + 1617 | cagttgcctcatcagaaaga T/A gaacagcattacgcctctgc | 1101 | | |
| ABCA1 | 101 | intron 16 + 95 | agttgagaacagaagatgat T/A gtcttttccaatgggacatg | 1102 | | |
| ABCA1 | 102 | intron 16 + 452 | tggtgttttgcttgagtaat G/A ttttctgaactaagcacaac | 1103 | | |
| ABCA1 | 103 | intron 16 + 657 | ctgttgcctcagtctgggct T/C cataggcatcagcagcccca | 1104 | | |
| ABCA1 | 104 | exon 17 + 2473 | gcttcaatctcaccacttcg G/A tctccatgatgctgtttgac | 1105 | | |
| ABCA1 | 105 | exon 18 + 2649 | ggttccaaccagaagagaat A/G tcagaaagtaagtgctgttg | 1106 | | |
| ABCA1 | 106 | intron 18 + 1730 | tgaaagttcaagcgcagtgc C/G ctgtgtccttacactccact | 1107 | | |
| ABCA1 | 107 | intron 19 + 428 | aggaccttacagtgggtagt A/G tcaggaggggtcaggggctg | 1108 | | |
| ABCA1 | 108 | intron 19 + 468 | aaagcaccagcgttagcctc A/G gtggcttccagcacgattcc | 1109 | | |
| ABCA1 | 109 | intron 20 + 876 | ccctcctcatctaaagtgaa C/T acatggggctcatgtgcagg | 1110 | | |
| ABCA1 | 110 | intron 22 + 118 | catgggatactcttctgtta T/G cacagaagagataaagggca | 1111 | | |
| ABCA1 | 111 | intron 22 + 560 | aaagctttgccattctaggg G/A tcatagccatacagggtgaa | 1112 | | |
| ABCA1 | 112 | intron 23 + 102 | accccttttgccatgttgaa A/G ccaccatctccctgctctgt | 1113 | | |
| ABCA1 | 113 | intron 23 + 287 | gtcaaagaaaagagacttgt C/T gtttatggatggatagtcta | 1114 | | |
| ABCA1 | 114 | intron 23 + 1063 | acctttcaccctcaggaagc G/A aggctgttcacacggcacac | 1115 | | |
| ABCA1 | 115 | intron 25 + 321 | ctctttacttaagtacagtg T/G gaggaacagcggcatcagga | 1116 | | |
| ABCA1 | 116 | intron 25 + 376 | gttagaaattcagcaacttg G/C gcccagctcagacctactga | 1117 | | |
| ABCA1 | 117 | intron 25 + 478 | catacataggaaatgacaaa C/T gtttatggatggatagtcta | 1118 | | |
| ABCA1 | 118 | intron 25 + 579 | tcatttaattctcaaaaaaa G/T atgaaaaaatgaacactcag | 1119 | | |
| ABCA1 | 119 | intron 27 + 153 | aatggtaaaagccacttgtt C/T tttgcagcatcgtgcatgtg | 1120 | | |
| ABCA1 | 120 | intron 28 + 1058 | actatcatgggagataatga C/T tatggttgtccatgattgga | 1121 | | |
| ABCA1 | 121 | intron 28 + 1317 | caggacccagtgttctgagt C/T accctgaatgtgagcactat | 1122 | | |
| ABCA1 | 122 | intron 30 + 372 | tatatgatttttaggttttg T/C ttatcagcttcttcgctttt | 1123 | | |
| ABCA1 | 123 | intron 30 + 506 | ccttttaaaaagtaagcagt A/G gataaataaattcagtgaag | 1124 | | |
| ABCA1 | 124 | intron 30 + 1033 | ctggatttcatggtgccttt G/c attttccacatgaaggttgt | 1125 | | |
| ABCA1 | 125 | exon 31 + 4281 | tcttccctttgcagagacac G/A ccctgccaggcaggggagga | 1126 | | |
| ABCA1 | 126 | intron 33 + 626 | ggctccttgttactgatttc C/T gtcttttctctctgcctttt | 1127 | | |
| ABCA1 | 127 | intron 33 + 719 | taatagccctcatgctagaa G/A ggagccggagcctgtgtata | 1128 | | |
| ABCA1 | 128 | intron 33 + 726 | cctcatgctagaagggagcc G/A gagcctgtgtataaggccag | 1129 | | |
| ABCA1 | 129 | intron 33 + 889 | ctttcctcaatgtctcagct A/G tctaactgtgtgtgtaatca | 1130 | | |
| ABCA1 | 130 | intron 33 + 1097 | ctgtgcaccccactgtctgg G/C ttttaatgtcaggctgttct | 1131 | | |
| ABCA1 | 131 | intron 35 + 4760 | tatgacaggactggacacca G/A aaataatgtcaaggtaaacc | 1132 | | |
| ABCA1 | 132 | intron 35 + 234 | aacctatctaaacctcagtt T/C cctcatctgtgaaatggaga | 1133 | | |
| ABCA1 | 133 | intron 37 + 411 | aactctgtacattttatcag C/T agcttatccatccattgcaa | 1134 | | |
| ABCA1 | 134 | intron 37 + 1224 | caggcataggtgattcagag A/G tgaaaggtcaagtccctgaa | 1135 | | |
| ABCA1 | 135 | intron 37 + 1720 | aaattaaaattactctgact G/T ggaatccatcgttcagtaag | 1136 | | |
| ABCA1 | 136 | intron 40 + 251 | tgaaggtaaggaaaatagtg T/G tatttgcttggatccactgg | 1137 | | |
| ABCA1 | 137 | intron 40 + 252 | gaaggtaaggaaaatagtgt T/C atttgcttggatccactggc | 1138 | | |
| ABCA1 | 138 | intron 40 + 319 | agcactggaaaagtcaaacc A/G taactttgagaattaggtga | 1139 | | |
| ABCA1 | 139 | intron 40 + 957 | cttgttactcttttttcctt G/C tcatgggtgatagccatttg | 1140 | | |
| ABCA1 | 140 | intron 41 + 146 | tgatgtgggcatcccgcagc C/T ccctccctgcccatcctgga | 1141 | | |
| ABCA1 | 141 | intron 42 + 238 | cattggttttatatgcttac A/C tttatgtgttagttattaaa | 1142 | | |
| ABCA1 | 142 | intron 42 + 321 | aataaatggttgattttgag T/A ttgagtttcatagtccaaaa | 1143 | | |
| ABCA1 | 143 | intron 42 + 322 | ataaatggttgattttgagt T/C tgagtttcatagtccaaaaa | 1144 | | |
| ABCA1 | 144 | intron 42 + 533 | agatgaaaaattatgtagat G/A ataatgaatgatacggttct | 1145 | | |
| ABCA1 | 145 | intron 42 + 546 | tgtagatgataatgaatgat A/G cggttctaaaaagacaggtt | 1146 | | |
| ABCA1 | 146 | intron 43 + 739 | tacagccacacttaaaatgg T/A cccattatgaaatacatatt | 1147 | | |
| ABCA1 | 147 | intron 44 + 18 | taggtgagaaaagaagtggc T/C tgtattttgctgcaaagact | 1148 | | |
| ABCA1 | 148 | intron 44 + 264 | acaatataatttgcttgttt T/C ttaagagtataatttagtga | 1149 | | |
| ABCA1 | 149 | intron 44 + 279 | tgttttttaagagtataatt T/C agtgatttttggtaaattga | 1150 | | |
| ABCA1 | 150 | intron 44 + 508 | tttacattgctacataaaat C/T cccctatgtacatgtaccta | 1151 | | |
| ABCA1 | 151 | intron 44 + 1477 | gatctcctctcctgtctctt A/T catttttgcagtagcaatgt | 1152 | | |
| ABCA1 | 152 | intron 44 + 1665 | tggttgtaagaactgatttg G/A ttggtatagctgtgagggcc | 1153 | | |
| ABCA1 | 153 | intron 44 + 1956 | gtgttgctcacactcaaaat T/G tctgggccttctcatttggt | 1154 | | |
| ABCA1 | 154 | intron 45 + 68 | aatatataccttatggcttt T/C ccacacgcattgacttcagg | 1155 | | |
| ABCA1 | 155 | intron 46 + 608 | ttatactgacttcaatagag G/C tttcagacaaaaagttgttt | 1156 | | |
| ABCA1 | 156 | intron 47 + 336 | ttcacaattgtaaacaccac T/C acactgaacagcatcatccc | 1157 | | |
| ABCA1 | 157 | intron 49 + 55 | agggtgtggattcctgcccc G/C acactcccgcccataggtcc | 1158 | | |
| ABCA1 | 158 | 3′UTR(exon 50)+ 7949 | aacaaaaatgtgggtgtctc C/T aggcacgggaaacttggttc | 1159 | | |
| ABCA1 | 159 | 3′UTR(exon 50)+ 8226 | aggagcccactgtaacaata C/T tgggcagccttttttttttt | 1160 | | |
| ABCA1 | 160 | 3′UTR(exon 50)+ 8682 | aacttcttccactttttcca G/A aatttgaatattaacgctaa | 1161 | | |
| ABCA1 | 161 | 3′UTR(exon 50)+ 8697 | ttccagaatttgaatattaa C/T gctaaaggtgtaagacttca | 1162 | | |
| ABCA1 | 162 | 3′UTR(exon 50)+ 9097 | aactattttgaagaaaacac A/G acattttaatacagattgaa | 1163 | | |
| ABCA1 | 163 | 5′flanking − (1033-1032) | tgacttaaatatttagacat (AT) ggtgtgtaggcctgcattcc | 1164 | | |
| ABCA1 | 163 | 5′flanking − (1033-1032) | tgacttaaatatttagacat ggtgtgtaggcctgcattcc | 1165 | | |
| ABCA1 | 164 | intron 5 + 6368 | ttctgatggggttgttgctg C/Δ tgagaatcatgactgggtgg | 1166 | | |
| ABCA1 | 165 | intron 5 + 9709 | cattttctgtctgaaccccc T/Δ cacccattcaggcagctgct | 1167 | | |
| ABCA1 | 166 | intron 5 + 13816 | tccctacttctccttttttt T/Δ catttgcctcctccacccac | 1168 | | |
| ABCA1 | 167 | intron 10 + (270-271) | cttttcagggaggagccaaa (G) cgctcattgtctgtgcttct | 1169 | | |
| ABCA1 | 167 | intron 10 + (270-271) | cttttcagggaggagccaaa cgctcattgtctgtgcttct | 1170 | | |
| ABCA1 | 168 | intron 20 + (611-612) | tttagcccatcctctccccc (C) gccaccctccttattgaggc | 1171 | | |
| ABCA1 | 168 | intron 20 + (611-612) | tttagcccatcctctccccc gccaccctccttattgaggc | 1172 | | |
| ABCA1 | 169 | intron 32 + (391-392) | gagtgccttgggtactctct (T) gatgggggactccatgataa | 1173 | | |
| ABCA1 | 169 | intron 32 + (391-392) | gagtgccttgggtactctct gatgggggactccatgataa | 1174 | | |
| ABCA1 | 170 | intron 37 + 847 | gctgtatattgtgaatgtcc C/Δ gttttcaaaagcaaaagccaa | 1175 | | |
| COMT | 1 | 5′flanking − 1287 | cgtatgatattccccattct G/A agtccagaatacctagaaat | 1176 | | |
| COMT | 2 | 5′flanking − 1217 | tgtgagtatgggaaggggaa G/A cttttctgtctgttgtcccc | 1177 | | |
| COMT | 3 | 5′flanking − 503 | caggggctccaggaggacga G/A tgtgtatcctcccattgctc | 1178 | | |
| COMT | 4 | 5′flanking − 425 | gagaagttgggaagtctggc C/T agtggggccggtgcctggtg | 1179 | | |
| COMT | 5 | 5′flanking − 277 | cccagccccagtttccccac C/T tgggaagggggctacttgtg | 1180 | | |
| COMT | 6 | intron1 + 12058 | ctggcccatggaagggaggg G/A agggggccccgacggggcca | 1181 | | |
| COMT | 7 | intron1 + 12070 | agggaggggagggggccccg A/G cggggccacagtaaaggagt | 1182 | | |
| COMT | 8 | intron1 + 18831 | tgtgtatgttcttggtaaac C/T agcccttggtcttacacatc | 1183 | | |
| COMT | 9 | intron2 + 832 | cctctcctttggccacccgt G/C actacccccaactccgggcc | 1184 | | |
| COMT | 10 | intron3 + 90 | ggagaagctgttatcacccc A/G tttccagggggctgggaacc | 1185 | | |
| COMT | 11 | intron3 + 425 | ccccaaggtgggcggttcgg T/G gattcagagagggcagctct | 1186 | | |
| COMT | 12 | intron3 + 871 | ggctcctgctctttgggaga G/A gtggggggccgtgcctgggg | 1187 | | |
| COMT | 13 | intron3 + 876 | ctgctctttgggagaggtgg G/T gggccgtgcctggggatcca | 1188 | | |
| COMT | 14 | intron4 + 75 | tcagcctcagcctctccaaa G/C agccaggcattccagtagag | 1189 | | |
| COMT | 15 | intron5 + 310 | accagacaccagggcagaaa C/T ggcacaggaccaaggagatg | 1190 | | |
| COMT | 16 | intron5 + 346 | agatggggtggggaagggcc G/A ctctgggcccagcctgctct | 1191 | | |
| COMT | 17 | intron5 + 3023 | aaggcagccgccctgctcaa G/A gcctaggccattgtcctcct | 1192 | | |
| HNMT | 1 | 5′flanking − 211 | cagaggcagatgacagtctt C/T cgttaaagatttcactgctg | 1193 | | |
| HNMT | 2 | intron1 + 5409 | aatataactgatataattgg A/G acatttcatgttggcctagt | 1194 | | |
| HNMT | 3 | intron2 + 2561 | cacttgtgcttggacaagaa A/G agaaggcctacaagaaaaag | 1195 | | |
| HNMT | 4 | intron2 + 2895 | caatcagaaatgtaagaaaa A/C ctccaagaaaaatttaagtt | 1196 | | |
| HNMT | 5 | intron2 + 3977 | accaaacttggaagtgtaaa G/A ttatgcatgtatgttcatgt | 1197 | | |
| HNMT | 6 | intron2 + 5296 | ttaacatagtgagtttggag T/C cccaggattttattttcctt | 1198 | | |
| HNMT | 7 | intron2 + 13317 | caaccctcatgaattcttag C/T tgggatgggtccctataaca | 1199 | | |
| HNMT | 8 | intron2 + 14682 | gtagatgagcaaatgagttc A/Δ ggagagatttaaatacccta | 1200 | | |
| HNMT | 9 | intron2 + 15406 | gtctatgcattcatgcatcc G/A tctaaccagctgtctaccta | 1201 | | |
| HNMT | 10 | intron2 + 28943 | atgtgacttaaacttcaggt A/G tatcaatatcccttgaatgt | 1202 | | |
| HNMT | 11 | intron4 + 49 | cagaaagaagacttttcaga A/G tatatatataatgaatatct | 1203 | | |
| HNMT | 12 | intron4 + (1942-1943) | tttgagaaaaatttaaggta (A) tcttctatggcccacttcca | 1204 | | |
| HNMT | 12 | intron4 + (1942-1943) | tttgagaaaaatttaaggta tcttctatggcccacttcca | 1205 | | |
| HNMT | 13 | intron4 + 2405 | ccctgtgaccaagcagataa C/A ctcatgctttatttagtcca | 1206 | | |
| HNMT | 14 | intron5 + (80 − 81) | cctgtgtttgaaagaagctt (TT) atatattttgtcttcattat | 1207 | | |
| HNMT | 14 | intron5 + (80 − 81) | cctgtgtttgaaagaagctt atatattttgtcttcattat | 1208 | | |
| HNMT | 15 | intron5 + 235 | ctttcttttgggaaaatatg T/C ctttgtcttctatatatgaa | 1209 | | |
| HNMT | 16 | intron5 + (702-703) | tacttacaggttgattttag (AT) acacagcagactctgtcttc | 1210 | | |
| HNMT | 16 | intron5 + (702-703) | tacttacaggttgattttag acacagcagactctgtcttc | 1211 | | |
| HNMT | 17 | intron5 + 749 | ttacaccagaccccatactt T/G aacaccatatgtcacaaaat | 1212 | | |
| HNMT | 18 | intron5 + 1101 | gtaggcagcctattcttgat T/G atattcatcaatcatacaga | 1213 | | |
| HNMT | 19 | intron5 + 1137 | acagaaaaagtattgtagac G/A gaaataacaattcattgaga | 1214 | | |
| HNMT | 20 | intron5 + 1348 | aagggagcatgaatagtcca C/G aagtaactgagaactgatta | 1215 | | |
| HNMT | 21 | intron5 + 1673 | caaaagaaagggagtaaaga C/G tcaacaatcagttagctttt | 1216 | | |
| HNMT | 22 | intron5 + 2022 | attttatttggggctttcta C/T gtctctctctcctaagccta | 1217 | | |
| HNMT | 23 | intron5 + 2285 | tgtcatacttaactcttaaa G/C atccagagtaaatgatggag | 1218 | | |
| HNMT | 24 | intron5 + 4159 | taccagttgacccagcaacc C/T tcttatagagtagtttaaat | 1219 | | |
| HNMT | 25 | intron5 + 4501 | aatgatccacaaaattacta C/G tcattgttttctttcaatga | 1220 | | |
| HNMT | 26 | intron5 + 5251 | cacacacacacacacacaca C/G caaatggaagcagccagaca | 1221 | | |
| HNMT | 27 | intron5 + 5802 | gaaaaagaaaatctggctta C/T atcatgttgaaaacaaaagt | 1222 | | |
| HNMT | 28 | intron5 + | 6189 tccaattccaccttctccta G/C agcatatcctgcagttacct | 1223 | | |
| HNMT | 29 | intron5 + 6297 | gtcttggttcatctcttgag T/A taaattagatctgggaactt | 1224 | | |
| HNMT | 30 | 3′flanking + 458 | tatgtcactctcaagaactc C/T tataagaccaagagtcatct | 1225 | | |
| HNMT | 31 | 3′flanking + 993 | ctgaaaatgaacactgaacc G/A ttaatcatactgatatgtac | 1226 | | |
| HNMT | 32 | 3′flanking + 1793 | gtggagcacagcattttagg G/A cttgatatttgcttattata | 1227 | | |
| GAMT | 3 | intron5 + 1411 | ggtgacctggtgccatcccc G/A accaggagacgcaggtgccc | 1228 | | |
| PNMT | 2 | intron1 + 35 | ctgaggcacgagggacaaga G/T gtcgtcggggagtgaaagca | 1229 | | |
| CYP1A1 | 1 | intron 1 + 1590 | ccactcttcaaaaggaggta C/T atgtgacagcagctggaaat | 1230 | | |
| CYP1A1 | 2 | exon2 + 160 | gaatccaccagggccatggg G/A ctggcctctgattgggcaca | 1231 | | |
| CYP1A2 | 1 | 5′flanking − 731 | gcctgggctaggtgtagggg T/G cctgagttccgggctttgct | 1232 | | |
| CYP1A2 | 2 | intron1 + 371 | cttccctgtgttcacactaa C/T cttttccttctttgaaattg | 1233 | | |
| CYP1A2 | 3 | intron3 + 44 | atagccaggagaagccttga G/A acccaggttgtttgttcagt | 1234 | | |
| CYP1A2 | 4 | intron5 + 81 | tccctgctaggaactgttta T/C ataatgaaaggaggggacct | 1235 | | |
| CYP1A2 | 5 | exon6 + 181 | ctggccatcctgctacagca A/T ctggagttcagcgtgccgcc | 1236 | | |
| CYP1A2 | 6 | exon6 + 295 | cggctgcgcttctccatcaa C/T tgaagaagacaccaccattc | 1237 | | |
| CYP1B1 | 1 | 5′flanking − 3669 | tgtatcctgtgaagcatcac G/A gttatccttctctgcacatg | 1238 | | |
| CYP1B1 | 2 | 5′flanking − 3149 | tgacagcacttaccaaccta G/C ttcctctgatttttgagtca | 1239 | | |
| CYP1B1 | 3 | 5′flanking − 1222 | gggggaagccacccccgccc G/A agcgcctccggcttccctta | 1240 | | |
| CYP1B1 | 4 | 5′flanking − 376 | ttccgggaagcaagctcaag T/C cgcggagagggaagggaggt | 1241 | | |
| CYP1B1 | 5 | 5′flanking − 265 | ctggggacaccgtgcggcct C/T gattggaggtggctgtgatg | 1242 | | |
| CYP1B1 | 6 | intron1 + 129 | tgcccgcagcgttgtcccca G/A attgcaggaaccgttacgcg | 1243 | | |
| CYP1B1 | 7 | intron1 + 379 | tgagtgtcacgccttctcct C/T tctgtccccagcatgggcac | 1244 | | |
| CYP1B1 | 8 | exon3 + (799-800) | agcttctgggagattttttt (T) gagtcaaagacttaaagggc | 1245 | | |
| CYP1B1 | 8 | exon3 + (799-800) | agcttctgggagattttttt gagtcaaagacttaaagggc | 1246 | | |
| CYP1B1 | 9 | exon3 + 1284 | agtatagtggggttccatga G/T ttatcatgaattttaaagta | 1247 | | |
| CYP1B1 | 10 | 3′flanking + 2226 | tttctttttctttttttttt T/Δ aaaatttattcctatttcct | 1248 | | |
| CYP1B1 | 11 | 3′flanking + (2226-2227) | ttcttttctttttttttt (T) aaaatttattcctatttcct | 1249 | | |
| CYP1B1 | 11 | 3′flanking + (2226-2227) | ttcttttctttttttttt aaaatttattcctatttcct | 1250 | | |
| CYP1B1 | 12 | 3′flanking + 2230 | ttttcttttttttttttaaa A/Δ tttattcctatttccttaca | 1251 | | |
| PEMT | 90 | intron1 + (297-298) | attgtgtgagactcagaggt TGT/Δ ccgtgttagtctttgggatt | 1252 | | |
| PEMT | 91 | intron1 + 817 | tcatgaagcctgtaaggcac A/G tctctgccccaagcagcttc | 1253 | | |
| PEMT | 92 | intron1 + 830 | aaggcacatctctgccccaa G/A cagcttctaatccagttctt | 1254 | | |
| PEMT | 93 | intron1 + 1035 | gagttctctgaaggagctaa T/C accagttagtgttttgaaga | 1255 | | |
| PEMT | 94 | intron1 + 1573 | agtgggcaggggagactaac C/T gggtgtgtgaggggtgggct | 1256 | | |
| PEMT | 95 | intron1 + 1759 | gatttttcttaaagaaagaa A/G gaaagaaacatacaacatac | 1257 | | |
| PEMT | 96 | intron1 + 2768 | gcatcttgctgtccacaggc C/A ggggcacctccaggattcag | 1258 | | |
| PEMT | 97 | intron1 + 2768 | ggccggggcacctccaggat T/C cagaagatgactccagtagg | 1259 | | |
| PEMT | 98 | intron2 + 4598 | ccgtgggttttttttttttt T/Δ cttcatttctttggttgctg | 1260 | | |
| NAT2 | 21 | exon2 + 288 | atgttaggagggtattttta C/T atccctccagttaacaaata | 1261 | | |
| NAT2 | 22 | 5′flank − 2053 | ctggattgcaacattttaat T/C ccaggtgtcaggtttccaac | 1262 | | |
| NAT2 | 23 | 5′flank − 1299 | gaatcaccagtgcgggaggt A/G taacagtgaacccaagacac | 1263 | | |
| NAT2 | 24 | 5′flank − 1145 | ctgtagaacacaaggatatt C/T ggaggcagtttgtacatgcc | 1264 | | |
| NAT2 | 25 | 5′flank − 1036 | ccttcccacagagtcccgag T/A tcatgtggcagcatgccaga | 1265 | | |
| NAT2 | 26 | 5′flank − 94 | aaagatttgctaagagattc G/A cagaggcaacctgaggccct | 1266 | | |
| NAT2 | 27 | 5′flank − 643 | atgtttatattttatattaa T/C attaatgtaaataaaaattt | 1267 | | |
| AADA | 1 | 5′UTR + 29 | attaaagtacactattcagg C/T atatcatgtaggtttacttt | 1268 | | |
| AADA | 2 | intron1 + 138 | gctgtggcctttgacaatgt G/A ttacttagaaatgttgtttg | 1269 | | |
| AADA | 3 | intron1 + 142 | tggcctttgacaatgtgtta C/T ttagaaatgttgtttgtttt | 1270 | | |
| AADA | 4 | intron1 + 1033 | ttccagcagagacaccaaca A/G gtaaaaacaccccagctaca | 1271 | | |
| AADA | 5 | intron1 + 1253 | tttttttccctcatatttgc T/C gtctgtgctacaatatgtga | 1272 | | |
| AADA | 6 | intron1 + 1366 | ctctggtcgccttttaatta A/G ttaattcattcatttactta | 1273 | | |
| AADA | 7 | intron1 + 1369 | tggtagccttttaattaatt A/C attcattcatttacttacat | 1274 | | |
| AADA | 8 | intron1 + 2501 | ggttacagaaagaatggtgg C/A ttggccaaaaaatgatatgg | 1275 | | |
| AADA | 9 | intron2 + 1971 | aaatgagagttaagtaggag A/C attttcttttatttttgtgc | 1276 | | |
| AADA | 10 | intron2 + 1988 | gagaattttcttttattttt A/G tgcaggagaaatataaacaa | 1277 | | |
| AADA | 11 | intron2 + 2341 | aggtgccttttctattgtcc C/T atgcagacttaggtgatcct | 1278 | | |
| AADA | 12 | intron2 + 2546 | gtctgacacagaaggatcaa T/A ggcaaaatgtgcaagacaaa | 1279 | | |
| AADA | 13 | intron2 + 2609 | taggaggttcactgggaaac T/C tgaattccactgagtcatga | 1280 | | |
| AADA | 14 | intron2 + 2663 | tataaatacagtgttaaatt T/C gtctctcgtattttaaggta | 1281 | | |
| AADA | 15 | intron4 + 605 | tgtgtcagtaaaatattata T/C taagtaggtgaatgagatca | 1282 | | |
| AADA | 16 | intron4 + 621 | tatattaagtaggtgaatga G/T atcatgtaattgtgagacta | 1283 | | |
| AADA | 17 | intron4 + 679 | ttagagattcagacgaattc A/G tataatcttcgatggtgtat | 1284 | | |
| AADA | 18 | intron4 + 1680 | gttaaaatgtggataaatac C/T acaatttgcaaaatatttgg | 1285 | | |
| AADA | 19 | intron4 + 1748 | atttagaagttctatacatc T/C tttatagtatattacacact | 1286 | | |
| AADA | 20 | intron4 + 1771 | tatagtatattacacacttc G/A aaaacacaaaattatttttt | 1287 | | |
| AADA | 21 | exon5 + 238 | caagtcatctcttcaaattt A/G ttaattggagttccctgctc | 1288 | | |
| AADA | 22 | 3′UTR + 121 | ttagaaattggtctttctta A/G aatggtctagttaagttcca | 1289 | | |
| NTE | 1 | 5′flanking − 535 | cacgatctgtcctccgattc C/T tgttaactctagactttctg | 1290 | | |
| NTE | 2 | 5′flanking − 15 | gtaaatccccggcaaaaacc A/G gcagcgccttgcaagcccac | 1291 | | |
| NTE | 3 | 5′flanking − 748 | agcatggcgcggggaggagg G/T gtgggagggtcgggagggac | 1292 | | |
| NTE | 4 | 5′flanking − 690 | tgaataatttaaaggggccg T/C gcctgcggagccgggcggaa | 1293 | | |
| NTE | 5 | intron6 + 605 | tcttgccatatacttagtgg A/G ggggtctacatcaggggttt | 1294 | | |
| NTE | 6 | intron6 + 748 | agcctccagcctctcttctc C/T gggggttatctcaggcatct | 1295 | | |
| NTE | 7 | intron6 + 987 | ggtgctggctctgggatccc C/T gtgcgtcatgtagtctacct | 1296 | | |
| NTE | 8 | intron6 + 1882 | tggcctcaagcaatcctccc G/A cctcggcctcccaaagtgct | 1297 | | |
| NTE | 9 | intron6 + 2222 | gaatgtttatgtagaacaga G/A agactgtatctgcggtcttc | 1298 | | |
| NTE | 10 | intron12 + 168 | tatctggtaccgaggaagct C/G tggcctcgtccccaagggcc | 1299 | | |
| NTE | 11 | intron13 + 69 | atccaggtccaccgcctgcc C/T gtcttgattgttttaatctg | 1300 | | |
| NTE | 12 | intron14 + 8 | agcccccgctcgggtaaggc C/T tgggaccctgcccggtggtg | 1301 | | |
| NTE | 13 | intron16 − 113 | gccaccgcgccctgcgcctt T/C atatttttcttaacccttcc | 1302 | | |
| NTE | 14 | intron21 + 34 | agagccggccggcccagagc A/G tgctgggagatgtagtccgg | 1303 | | |
| NTE | 15 | intron21 + 128 | gaagaaatcgtgcccctgag G/A gtttcaaaccctaagtagga | 1304 | | |
| NTE | 16 | intron21 + 151 | ttcaaaccctaagtaggacc C/G aggtgcagagcattctgggg | 1305 | | |
| NTE | 17 | intron21 + 651 | ccactgtactccagccggga C/T gacagagctagaacctgttt | 1306 | | |
| NTE | 18 | intron21 + 797 | tggaaaatagtctgtggatt G/T ttgtttaggactctgggcac | 1307 | | |
| NTE | 19 | intron21 + 1752 | acagctggtctaggctgtta G/C tggagaaactgggaagcaac | 1308 | | |
| NTE | 20 | intron21 + 1788 | gaagcaacagctgggtcaaa A/Δ gtagcttttcttttcttggc | 1309 | | |
| NTE | 21 | intron21 + 1907 | cactgcaacctctgcctccc A/G ggttcaagtgattctcctgc | 1310 | | |
| NTE | 22 | intron21 + 2065 | ctgcctcgttttatgttcag G/T tcccccattagacagaggaa | 1311 | | |
| NTE | 23 | intron21 + 2336 | agtctgggagcacaggagca G/A gaatttcagataaggaggaa | 1312 | | |
| NTE | 24 | intron23 + 41 | tggggagggtggtgggtggg G/C ctggagcctcaaattctttc | 1313 | | |
| NTE | 25 | intron23 + 71 | caaattctttcagacctgag T/C tcaagttctcggcttccaac | 1314 | | |
| NTE | 26 | intron23 + 81 | cagacctgagttcaagttct C/T ggcttccaaccacggagcct | 1315 | | |
| NTE | 27 | intron24 + 150 | gtggggcggctggtgacctc A/C gccgtccgtattccgcagct | 1316 | | |
| NTE | 28 | intron29 + 37 | gcctgcagcaaccgctgacg T/C cacgtggggttggggggatg | 1317 | | |
| NTE | 29 | intron29 + 370 | cgtcccaggtcagcgagccc G/A tcgggccggctgggcctccg | 1318 | | |
| NTE | 30 | intron30 + 56 | acctcccgcaccacacacac G/A cacacgcgtgggcacacaca | 1319 | | |
| NTE | 31 | intron30 + 358 | aaaaatacaaaaaattaacc A/G ggctggtggggtgtgcctgt | 1320 | | |
| NTE | 32 | intron30 + 372 | ttaaccaggctggtggggtg T/C gcctgtaatcccagctactc | 1321 | | |
| NTE | 33 | intron30 + 430 | aaatcacttgaacctgggag G/T tggaggttgcagtgagctga | 1322 | | |
| NTE | 34 | intron30 + 655 | gtgtgcacaccagctatata T/C gcaaatgctttctctcaggg | 1323 | | |
| NTE | 35 | intron30 + 659 | gcacaccagctatatatgca A/C atgctttctctcaggggcag | 1324 | | |
| NTE | 36 | intron30 + 760 | tgaaatagggcatttgccaa C/T gcatgccagtctgtcccgtt | 1325 | | |
| NTE | 37 | intron30 + 835 | gcacacacgtagataggatg T/C ggcacctctgaccgagttaa | 1326 | | |
| NTE | 38 | intron31 + 40 | tggtgcctgcataggtggtc T/C ggctaagctttgctacttaa | 1327 | | |
| NTE | 39 | intron31 + 41 | ggtgcctgcataggtggtct G/A gctaagctttgctacttaaa | 1328 | | |
| NTE | 40 | intron31 + 1329 | gtctgtcaagggcaggacag G/A ggatgtgtaggcgagtgtgc | 1329 | | |
| NTE | 41 | intron35 + 31 | aatggcttcctgtcgttttc G/A gactggggacccaccttctg | 1330 | | |
| DDOST | 8 | intron2 + 1299 | atcttctgatgactgggctt C/T ggtgcagtaactggtgtttg | 1331 | | |
| DDOST | 9 | intron2 + 1581 | gatactgttggtgggagaaa T/C gacagagagtgtaaaacagt | 1332 | | |
| DDOST | 10 | intron2 + 2822 | gtttctcaacaggtgcattc T/G tgacgtttcagactggataa | 1333 | | |
| DDOST | 11 | intron2 + 3392 | cagaaggcgtggaggcctgc C/T gcgcctccctctgttgctgc | 1334 | | |
| DDOST | 12 | intron2 + 495 | attgcttgaacccaggaggc G/A gaggttgcagtgagccaagg | 1335 | | |
| DDOST | 13 | intron5 + 226 | ggaactgcttgggtcacagc C/T tcgttttgttcccagtatcc | 1336 | | |
| DDOST | 14 | intron8 + 303 | aagagaaataggtcattagg A/T tgaatttgttaggcaagaga | 1337 | | |
| DDOST | 15 | 3′flanking + 40 | cacagcgtggagacggggca G/A ggaggggggttattaggatt | 1338 | | |
| MRP2 | 1 | exon 1 + 77 | catattaatagaagagtctt G/C gttccagacgcagtccagga | 1339 | | |
| MRP2 | 2 | intron2 + 192 | atcaaagtggctttgatttt T/G gcataagaatggtgactctt | 1340 | | |
| MRP2 | 3 | intron 1 + 413 | gataagttctagaactggca A/C ctaatgatatggactagaag | 1341 | | |
| MRP2 | 4 | intron2 + 3639 | gtcatatcccacccccaaat C/A gacccaataggtacaatgaa | 1342 | | |
| MRP2 | 5 | intron2 + 3989 | agttatgaaaccgatttttc C/T gggactggttgttctagtct | 1343 | | |
| MRP2 | 6 | intron2 + 4078 | aggtttccagatgtgttccc T/C aggcattcctggtggtagga | 1344 | | |
| MRP2 | 7 | intron2 + 4171 | cttattctttggtcagttgg C/T tttctaccacctcttagctt | 1345 | | |
| MRP2 | 8 | intron 2 + 5373 | gttaaggatatgtgaactca A/G aatttttatacacagtgcaa | 1346 | | |
| MRP2 | 9 | intron2 + 4436 | ggactagtggaagaattaga C/G ctttcctgaataaatagatc | 1347 | | |
| MRP2 | 10 | intron 2 + 3930 | aaaactggcaggagaatttc A/G ctggagctgcatgcaggact | 1348 | | |
| MRP2 | 11 | intron 2 + 4257 | gggtattggaaagttcttgc G/A gctgctggaggctgcggtgt | 1349 | | |
| MRP2 | 12 | intron 3 + 772 | ggtataaggcaagatttttt A/T aaaaaattaattgcttaatc | 1350 | | |
| MRP2 | 13 | intron 7 + 1658 | ggactcttaccagcttagtt G/T cctggttttctaatctaaaa | 1351 | | |
| MRP2 | 14 | intron 10 + 40 | tggccaggaaggagtacacc G/A ttggagaaacagtgaacctg | 1352 | | |
| MRP2 | 15 | intron 11 + 1672 | aactttttaagtcttaagac T/A ggaaggcctgtgtcctaggc | 1353 | | |
| MRP2 | 16 | intron 12 + 148 | ccctctcaccgccccatgcc A/G cttttcctcctttgtaccat | 1354 | | |
| MRP2 | 17 | intron 2 + 1020 | agtgctgcgattacaagcct G/C agccacctgcacagcctctg | 1355 | | |
| MRP2 | 18 | intron 2 + 5227 | taccataatttatgtgtcct A/G tatgacatgaatttcattgg | 1356 | | |
| MRP2 | 19 | intron 2 + 5373 | gttaaggatatgtgaactca A/G aatttttatacacagtgcaa | 1357 | | |
| MRP2 | 20 | intron 2 + 5538 | ttaatgaggttaagcacatg G/T tcatatgtttaaaagccttt | 1358 | | |
| MRP2 | 21 | intron 13 + 180 | catgagttttctgagcccca G/C tttatctaactataaaatga | 1359 | | |
| MRP2 | 22 | intron 13 + 1497 | gtgcagggtccccctgatgc T/C atagccagttcctctttaga | 1360 | | |
| MRP2 | 23 | intron 15 + 169 | atgagctgaaagcaaaggtt T/C tcagccccttcccctgataa | 1361 | | |
| MRP2 | 24 | intron 15 + 949 | ttccaggtgacacatttagt A/G cctaatttgggaaatgttaa | 1362 | | |
| MRP2 | 25 | intron 15 + 984 | tgttaatctagtccaatccc A/C ttagtaagaaaggaggggtc | 1363 | | |
| MRP2 | 26 | intron 16 + 4059 | catcctgatgcacagttatt C/T aaatttaagctccatttgtt | 1364 | | |
| MRP2 | 27 | intron 19 + 10899 | atgtatggagtatttatgga G/A taaagtattccatgctgtat | 1365 | | |
| MRP2 | 28 | exon 22 + 51 | caagcaataggattgttttc G/A atattcttcatcatccttgc | 1366 | | |
| MRP2 | 29 | intron23 + 56 | tatactgaggatctttctga C/T agggaggaattattatgtcc | 1367 | | |
| MRP2 | 30 | intron 23 + 734 | tgagccaactactgtactag G/A cactggggcactcaatgaat | 1368 | | |
| MRP2 | 31 | intron 23 + 801 | atgggccagacccaactcac T/G gattttttagtgtatctgag | 1369 | | |
| MRP2 | 32 | intron 27 + 124 | gggtccctaaagtttccttt C/G ctctaactcaaaggacctaa | 1370 | | |
| MRP2 | 33 | exon 28 + 52 | cagattggcccagcaaaggc A/C agatccagtttaacaactac | 1371 | | |
| MRP2 | 34 | exon 28 + 84 | aacaactaccaagtgcggta C/T cgacctgagctggatctggt | 1372 | | |
| MRP2 | 35 | exon 28 + 129 | agagggatcacttgtgacat C/T ggtagcatggagaaggtagg | 1373 | | |
| MRP2 | 36 | intron 29 + 154 | ttccctaggatggacacgtc A/G tttccagaactttgaaatgt | 1374 | | |
| MRP2 | 37 | intron 30 + 91 | gtgttaggtgatgcctggca T/C agaattttcatccaggtctg | 1375 | | |
| MRP2 | 38 | intron 31 + 170 | gccaaaattttacatcacgc A/G aatgaaaacgaacaaggtta | 1376 | | |
| MRP2 | 39 | intron 26 + 154 | ctggctccatcttttaccca T/C ggacgtattccttactcttc | 1377 | | |
| MRP2 | 40 | 3′-flanking + 739 | gtgaatttttattataagct C/T gttctccttaaaactttatc | 1378 | | |
| MRP2 | 41 | intron 3 + 1145 | acatccttctcccctcagtc C/T tcggttagtggcagtattct | 1379 | | |
| MRP2 | 42 | intron23 + 432 | tggcagtagagcagggtgag G/A aggattattctgcagaggaa | 1380 | | |
| ABCB1 | 1 | 5′flanking − 196 | gctttggagccatagtcatg T/C actcaaaatttattttatct | 1381 | | |
| ABCB1 | 2 | 5′flanking − 18 | tactctttacctgtgaagag T/C agaacatgaagaaatctact | 1382 | | |
| ABCB1 | 3 | intron1 + 71660 | cttgctggaggaagggtgct A/C gaaaatataccaaatccaag | 1383 | | |
| ABCB1 | 4 | intron1 + 80091 | gaaataatattcaagttctg A/C aataatatcatgacctatag | 1384 | | |
| ABCB1 | 5 | intron1 + 103126 | gatgtgaatcagaattcatc T/C gtgtctcaagaaaaggtcat | 1385 | | |
| ABCB1 | 6 | intron1 + 103148 | tgtctcaagaaaaggtcatg C/T gataaattaagttctgctag | 1386 | | |
| ABCB1 | 7 | intron1 + 108428 | aattaatttatcatcatctg A/G tcaccatttcacacaactca | 1387 | | |
| ABCB1 | 8 | intron1 + 112042 | cataagttgaaatgtcccca A/G tgattcagctgatgcgcgtt | 1388 | | |
| ABCB1 | 9 | intron2 + 491 | gctctctggcttcgacgggg G/Δ actagaggttagtctcacct | 1389 | | |
| ABCB1 | 10 | intron4 + 36 | attaactattcaaaatactt C/T ggaaatttgacatctcctta | 1390 | | |
| ABCB1 | 11 | intron5 + 1596 | ttagctctcttactgcttca T/C agtggaagaatcaaatactt | 1391 | | |
| ABCB1 | 12 | intron8 + 1789 | aaacactctgaatattaaac C/T gctcctggaaccacagctca | 1392 | | |
| ABCB1 | 13 | intron14 + 24 | agttgtccttgccctttgcc T/C ttctagaggtgcaaaaaata | 1393 | | |
| ABCB1 | 14 | intron14 + 81 | tgcaggaagttaggaaacta C/T tataaatcggaagaagggaa | 1394 | | |
| ABCB1 | 15 | intron15 + 38 | caaaccaacctgatttataa A/G cataagaacattctactact | 1395 | | |
| ABCB1 | 16 | intron17 + 73 | gtttggtgggctagggctcc A/G gtaggagtgggaacaagaga | 1396 | | |
| ABCB1 | 17 | intron18 + 564 | caacagtaaagttacaatct G/A aaaggaatgctctctgttta | 1397 | | |
| ABCB1 | 18 | intron18 + 2062 | tttccctgaggaatggttat C/T ctctgtgttccttgagtcca | 1398 | | |
| ABCB1 | 19 | intron18 + 2293 | ccacatcaggttttccccag A/G caccttgggacagtttgaaa | 1399 | | |
| ABCB1 | 20 | intron20 + 557 | aaaaccctaaccattgacac G/A tgtgaatgttttcctgggga | 1400 | | |
| ABCB1 | 21 | intron21 + 24 | cgtgcctcctttctactggt G/A tttgtcttaattggccattt | 1401 | | |
| ABCB1 | 22 | intron21 + 2725 | ctgacctgtttttggctgac A/G ggttttagttcctcccctca | 1402 | | |
| ABCB1 | 23 | intron21 + 4725 | tcttggtattaaaagatcca A/G agagataggaatatgtaatt | 1403 | | |
| ABCB1 | 24 | intron22 + 8507 | tgcacttaggaaaaaaacaa T/C atggaaatgtgtaaaatata | 1404 | | |
| ABCB1 | 25 | intron22 + 8537 | tgtaaaatatactttttttt T/A aaaaaaaaggacacatttat | 1405 | | |
| ABCB1 | 26 | intron22 + 8565 | aggacacatttattcagcat T/C atgatcagactattacattt | 1406 | | |
| ABCB1 | 27 | intron22 + 8952 | caccttggtttcatggtttg G/A caaagtactggcctgtacca | 1407 | | |
| ABCB1 | 28 | intron22 + 9520 | caccaacaaatatctttttc A/G cagttgggtgggcatctggt | 1408 | | |
| ABCB1 | 29 | intron22 + 9836 | agactctgacttagacatga C/T ggcaggggaaagagagactt | 1409 | | |
| ABCB1 | 30 | intron24 + 377 | taaaatacagatgtgttgta C/A taagttctgcaagcctttgg | 1410 | | |
| ABCB1 | 31 | intron24 + 1493 | ggggaggtgtccaggcacga A/Δ catggagagctggacttgat | 1411 | | |
| ABCB1 | 32 | intron24 + 1495 | ggaggtgtccaggcacgaac A/T tggagagctggacttgatac | 1412 | | |
| ABCB1 | 33 | intron25 + 342 | tgcagccttgatcttctggg C/T tcaagcgatcctcctgcctc | 1413 | | |
| ABCB1 | 34 | intron26 + 134 | cttggataaagtctgagagc C/G taaatatggtctccaagtgg | 1414 | | |
| ABCB1 | 35 | intron26 + 1272 | gtccttcaattttgtggtga A/G cttaaaaacaggactctaaa | 1415 | | |
| ABCB1 | 36 | intron26 + 1394 | tattaagtggtgtgttaaag A/G ttgtgctataatgaattgta | 1416 | | |
| ABCB1 | 37 | intron26 + (1987-1988) | aagggctggaagagtgaaag (AAAG) gaggctatttgctcccagac | 1417 | | |
| ABCB1 | 37 | intron26 + (1987-1988) | aagggctggaagagtgaaag gaggctatttgctcccagac | 1418 | | |
| ABCB1 | 38 | intron27 + 59 | gcagcctctctggcctatag G/T ttgatttataaggggctggt | 1419 | | |
| ABCB1 | 39 | intron27 + 80 | ttgatttataaggggctggt T/C tcccagaagtgaagagaaat | 1420 | | |
| ABCB3 | 1 | intron3+ 8 | tctcctttggcaggtaggtg G/A tgggcagctgggtccatttg | 1421 | | |
| ABCB3 | 2 | intron4+ 104 | cttcacccgtatgccaggac C/T tggggatgcttttctcttgt | 1422 | | |
| ABCB3 | 3 | intron10+ 219 | gcagcagtggtgctccctcc A/G tgggcagccccgtcaggtcc | 1423 | | |
| ABCB3 | 4 | intron11+ (317-319) | atggtgcccaggtggatgtg GTG/Δ tccatctcattcctgtcttt | 1424 | | |
| ABCB3 | 5 | exon12 + 19 | agctgcaggactggaattcc T/C gtggggatcgcacagtgctg | 1425 | | |
| ABCB3 | 6 | exon12+ (356-357) | aggtggggtggggtggggtg GG/TGGTGGGGTGGA ggct | 1426 | | |
| | | | tctgtgtccaggaaa | | | |
| ABCB7 | 1 | intron1 + 220 | acggggcaggaggttctggg C/A agaggacacctggagcgctg | 1427 | | |
| ABCB7 | 2 | intron1 + 480 | agttaactcccttgctgaca G/A gcgtgcttcttgataggcca | 1428 | | |
| ABCB7 | 3 | intron1 + (512-513) | gataggccaaaaccgtaact AT/Δ ctttccaaaacatagaccgc | 1429 | | |
| ABCB7 | 4 | intron1 + 1690 | agttctccaataaggcagat G/A aagttaagataaaatttgta | 1430 | | |
| ABCB7 | 5 | intron1 + 5309 | aattaatatcatttattgct G/A tattgttgtcagtgttatct | 1431 | | |
| ABCB7 | 6 | intron1 − 11274 | tgcttcttttcaagccagcc A/G gctttaaaaaaaagttagct | 1432 | | |
| ABCB7 | 7 | intron1 − 11085 | caggttttcagggctcatgt A/G gacctgaagaaaaatgagag | 1433 | | |
| ABCB7 | 8 | intron1 − 10037 | attctactttctcaacttct T/C ttattacattatctcatcat | 1434 | | |
| ABCB7 | 9 | intron1 − 21 | ccactctgaaacttccccct G/A ctttttttccttgtcagcag | 1435 | | |
| ABCB7 | 10 | intron3 + (135-136) | ttctctaatgaaaaaaaaaa (A) catattaattgaccatagtt | 1436 | | |
| ABCB7 | 10 | intron3 + (135-136) | ttctctaatgaaaaaaaaaa catattaattgaccatagtt | 1437 | | |
| ABCB7 | 11 | intron3 + 333 | aaaacaatttgtgtgtgtgc G/A tgtgcttcaaggttaatgtt | 1438 | | |
| ABCB7 | 12 | intron12 + 524 | taaccactctgccctcagta G/T gaaacacagtgccgaaccca | 1439 | | |
| ABCB7 | 13 | intron13 + 1543 | atcctgtgaggtggggaagc G/A tatggctagcataaatataa | 1440 | | |
| ABCB7 | 14 | intron13 + 2400 | tgttaccttactgcctcatt C/G tcattcttcccacctgctat | 1441 | | |
| ABCB7 | 15 | intron15 + 2201 | ctccttcctaaccttagcaa G/C agtctggagatttacttatc | 1442 | | |
| ABCB8 | 1 | 5′flanking − 2272 | ggcttaggcctaagggctga T/C gttggggccagtacccctga | 1443 | | |
| ABCB8 | 2 | 5′flanking − 2070 | agctatgaaaacaagaccct G/A tccttctagaggtagcaaaa | 1444 | | |
| ABCB8 | 3 | intron1 + 25 | aaacggaaaaacctactcag A/C gcgggccattgaccgcccgg | 1445 | | |
| ABCB8 | 4 | exon2 + 308 | tgctggtcctgggggtagcc G/A tcgtggtgaggctttcccca | 1446 | | |
| ABCB8 | 5 | intron2 + 334 | cccccacttaaaacatttgt C/G ccctctgtctccccattcca | 1447 | | |
| ABCB8 | 6 | intron4 + 12 | cctgctccggtactgccagc C/T gcagggtgcagagttggggt | 1448 | | |
| ABCB8 | 7 | intron5 + 547 | agttcatagcattctcgctc G/A gccccctcaggcctgctgct | 1449 | | |
| ABCB8 | 8 | exon7 + 57 | ggcaatgtgcggactgtgcg A/T gccttcgccatggagcaacg | 1450 | | |
| ABCB8 | 9 | intron9 + 1231 | tttccgcagctgcatggaca C/T cctcgcgtgccccgtttctg | 1451 | | |
| ABCB8 | 10 | intron9 + 2164 | cctcttggaggtccttctag C/T gctgcctatgtggagattct | 1452 | | |
| ABCB8 | 11 | intron9 + 2645 | ttcctgcctggtgcctcccc C/Δ ggctgcctttagcaagtgct | 1453 | | |
| ABCB8 | 12 | intron9 + 2646 | tcctgcctggtgcctccccc G/A gctgcctttagcaagtgctg | 1454 | | |
| ABCB8 | 13 | intron9 + 3229 | cagggccgagcagggagtcc G/A tgggtcagctgggctccctt | 1455 | | |
| ABCB8 | 14 | intron12 + (113-114) | tcctccactgccaccagggg (GG) ccttctttcctgggacaatc | 1456 | | |
| ABCB8 | 14 | intron13 + (113-114) | tcctccactgccacaagggg ccttctttcctgggacaatc | 1457 | | |
| ABCB8 | 15 | intron13 + 128 | tgctctcgggagaccctggc C/T gtcttcacatgtcctcagct | 1458 | | |
| ABCB8 | 16 | intron13 + 305 | atccaggtctagagaagcct A/G tagtggaggtgctgagctgc | 1459 | | |
| ABCB8 | 17 | intron14 + 135 | acagttgtgtcagggaagac C/G agaaccacagccaaagggga | 1460 | | |
| ABCB8 | 18 | intron14 + 159 | accacagccaaaggggacag A/T gtcgttgtgtggggacaggg | 1461 | | |
| ABCB8 | 19 | intron15 + 747 | gttggagccttgggctctgt A/G agggggacagagggaatcat | 1462 | | |
| ABCB8 | 20 | 3′flanking + 333 | cctatcccctggctcacccc G/A cagtgcattgatggagcagc | 1463 | | |
| ABCB8 | 21 | 3′flanking + 1168 | ccctctttcaggggtgtgat G/A cagtgcattgatggagcagc | 1464 | | |
| ABCB8 | 22 | 3′flanking + (1719-1721) | tagaccgcaggagccgcgcc GTC/Δ ttcctaacctcgcctcggcc | 1465 | | |
| ABCB9 | 1 | intron1 + 69 | agggtgccaggccaggcacg G/C gttggggggcgtctgggcac | 1466 | | |
| ABCB9 | 2 | intron1 + 8873 | tgggcccagcacgtggggcc T/C ggaactacctcaaaggcttc | 1467 | | |
| ABCB9 | 3 | intron1 + 8940 | accagctcagcctgcccagc G/A tgcacacggcaccaagctgg | 1468 | | |
| ABCB9 | 4 | intron1 + 11410 | agatccaagggatccagagg T/C tggaatgtgaccctccgtgc | 1469 | | |
| ABCB9 | 5 | intron1 + 12863 | gggaagccagatgcccacaa G/A gctctgtgacttcacttcca | 1470 | | |
| ABCB9 | 6 | intron1 + 19731 | gccaagtgtcaagatcgagc G/A aggggagggcctgacgaggg | 1471 | | |
| ABCB9 | 7 | intron1 + 29649 | cagaatccagatgcccgtaa T/C gttgttaagaagcctgcaca | 1472 | | |
| ABCB9 | 8 | intron1 + 31793 | ggccaggcggggaggggtac C/T ggccagaccggtgggcaaaa | 1473 | | |
| ABCB9 | 9 | intron1 + 37537 | agagtcacagggttggggtg C/A ccccgggaaggtggcatcta | 1474 | | |
| ABCB9 | 10 | intron1 + 38293 | taccagccctgtgctttcag G/A gaccatgtgacctgtcaact | 1475 | | |
| ABCB9 | 11 | intron1 + 44661 | cccgaggtgcctggcttcac A/G gcaggattgccgtcctgcag | 1476 | | |
| ABCB9 | 12 | intron1 + 49576 | aaagtggccccgtggcttgt C/T ccctgaagccctaaagcacc | 1477 | | |
| ABCB9 | 13 | intron1 + 64669 | ccacagacaagccgggtagc C/A cacctcgcagctcaacacac | 1478 | | |
| ABCB9 | 14 | exon2 + 448 | cctggttttgggccctgttc G/A tgtggacgtacatttcactc | 1479 | | |
| ABCB9 | 15 | intron7 + 3364 | ggtaccaggagtcgggtatc A/G gtgggacaggaacgcgtgtc | 1480 | | |
| ABCB9 | 16 | intron11 + 113 | gggccccaggagctctccca G/T actatcagcctcctgggctg | 1481 | | |
| ABCB9 | 17 | exon12 + 370 | cccaggcctgcagcactgaa A/G gacgacctgccatgtcccat | 1482 | | |
| ABCB10 | 1 | 5′flanking − 424 | tcgcgtctgcgcgctccgcc C/T ggtctgccggcgtgagaaag | 1483 | | |
| ABCB10 | 2 | exon1 + 491 | acaaggggcggttgcgcccc G/T cagcggccggactcccggag | 1484 | | |
| ABCB10 | 3 | intron1 + 37 | ccacttccctccgccgggcc T/G ctccttctccacacgcgggg | 1485 | | |
| ABCB10 | 4 | intron1 + 217 | actcgtttgcagattttaca C/T ttgttttcttgttgacacac | 1486 | | |
| ABCB10 | 5 | intron1 + 405 | gcgtttatactttttttttt T/Δ aaccaaaaacacattatttg | 1487 | | |
| ABCB10 | 6 | exon3 + 185 | agggccggggcccaggcttc C/T gtaggcatcagtatgatggt | 1488 | | |
| ABCB10 | 7 | intron6 + 1269 | caaattcacaactgtgcctt C/G cacagaatgggttggaaaac | 1489 | | |
| ABCB10 | 8 | intron9 + 632 | ccccactccacttgggtgag G/A gcaggtggatggtgatgggt | 1490 | | |
| ABCB10 | 9 | intron10 + 2373 | tacctcagggcactcagaca G/C cctcaccaatcagaggctca | 1491 | | |
| ABCB10 | 10 | intron11 + 108 | tccttttcctgttttttgtt T/G tttttttttcttgggagtgg | 1492 | | |
| ABCB10 | 11 | intron11 + 2379 | cattggtttttagtgtattc T/A gtgttgtgcatccatcatca | 1493 | | |
| ABCB11 | 1 | 5′flanking − (2596-2595) | tgtggtttagagctttctct (TT) gagacatttttgctaaggtt | 1494 | | |
| ABCB11 | 1 | 5′flanking − (2596-2595) | tgtggtttagagctttctct gagacatttttgctaaggtt | 1495 | | |
| ABCB11 | 2 | 5′flanking − 1746 | agctgaagtgaattaagcac G/A atcaactcagtactcacact | 1496 | | |
| ABCB11 | 3 | 5′flanking − (326-314) | agggggacagtttaaaggta (T)9-12 gtcttgttatgtttttaagt | 1497 | | |
| ABCB11 | 4 | 5′flanking − 135 | agagggtttcccaagcacac T/C ctgtgtttggggttattgct | 1498 | | |
| ABCB11 | 5 | intron1 + 511 | aaatatagatgcaaaaaaaa A/Δ tgagctgtggatgcatgttt | 1499 | | |
| ABCB11 | 6 | intron1 + 581 | aatttcagtttttaggtcac C/T caagccagtgggagtcacat | 1500 | | |
| ABCB11 | 7 | intron1 + (1938-1951) | aaagacgttttaagggcttt (A)10-13 gaaagaaaagaaaactgtag | 1501 | | |
| ABCB11 | 8 | intron1 + 4517 | ggtttcccaacatctcatct G/A ataaaaaaaataatttgcca | 1502 | | |
| ABCB11 | 9 | intron1 + 5651 | aaagagaataggttagtgga T/C tagtattcctgtgcttaatg | 1503 | | |
| ABCB11 | 10 | intron1 + (12200-12201) | aagagatggtctctagcccc CT/Δ gtttgatttggggcacttac | 1504 | | |
| ABCB11 | 11 | intron1 + 13023 | gtttggctactttgattaaa G/A aagaaagaagagataataat | 1505 | | |
| ABCB11 | 12 | intron2 + 739 | cctgcatctattctgaccta C/T actggggaaaacagtatgtg | 1506 | | |
| ABCB11 | 13 | intron2 + (921-922) | tattttgtagttcaaaaagt (CAGATCTTCTTCAGCT | 1507 | | |
| | | | AATTTAGAAATGT) tgctgccatttgatattca | | | |
| ABCB11 | 13 | intron2 + (921-922) | tattttgtagttcaaaaagt tgctg | 1508 | | |
| | | | tccatttgatattca | | | |
| ABCB11 | 14 | intron3 + 644 | agccacacgtttcttattgc G/A tgggagtttaaaaaaatggg | 1509 | | |
| ABCB11 | 15 | intron3 + 2231 | agtgaacctgagattgagct A/G tactgaaatctctagaagag | 1510 | | |
| ABCB11 | 16 | intron3 + 2406 | aaagggtggtctttaaatcc T/C tatgtttttctcatcaggtt | 1511 | | |
| ABCB11 | 17 | exon4 + 10 | tttctcatcaggttacaaga T/C gagaagaaaggtgatggcgt | 1512 | | |
| ABCB11 | 18 | intron4 + 434 | acaatttatagtatttctca A/G tgccccacacagtttatcta | 1513 | | |
| ABCB11 | 19 | intron4 + 518 | gtagatgagtagctaaaaac G/T aaagtcagctcctgaaataa | 1514 | | |
| ABCB11 | 20 | exon5 + 120 | ggcacaatgacagatgtttt T/C attgactacgacgttgagtt | 1515 | | |
| ABCB11 | 21 | intron5 + 320 | gggaggtgacccatgaattt T/C acttgagtatcatctccaag | 1516 | | |
| ABCB11 | 22 | intron5 + 16076 | agaagaggtaacagtaagcc T/G cctgatttacagcacacatc | 1517 | | |
| ABCB11 | 23 | intron6 + 303 | atttgcaggtgtgtttgtag G/C gggcagttgagtagcttgaa | 1518 | | |
| ABCB11 | 24 | intron7 + 1141 | aaaggattcagcaggcatga A/G gaaagaaaagctttgcaaga | 1519 | | |
| ABCB11 | 25 | intron8 + 2463 | ccattggctaatagcaatga A/C ctatgacatggtctaactta | 1520 | | |
| ABCB11 | 26 | intron8 + 2677 | tcaatgatgttacagtgaga A/C tctaatattgtattaaaccc | 1521 | | |
| ABCB11 | 27 | intron8 + 2699 | ctaatattgtattaaaccca T/A gccacatgttaaatgaatct | 1522 | | |
| ABCB11 | 28 | intron9 + 24 | gtgtccaagtttacggacta T/C gagctgaaggcctatgccaa | 1523 | | |
| ABCB11 | 29 | intron10 + 108 | caccttggtctgtggcctcc A/G gaggaagtacttgttcaaga | 1524 | | |
| ABCB11 | 30 | intron10 + 2475 | taatcattccaaaccacgga C/A tttatttcattaagaacatg | 1525 | | |
| ABCB11 | 31 | intron10 + 2478 | tcattccaaaccacggactt T/A atttcattaagaacatgata | 1526 | | |
| ABCB11 | 32 | intron10 + 2711 | tttacagattggaaaagcca C/T tgaagtcttgcaggtccaga | 1527 | | |
| ABCB11 | 33 | intron10 + 3539 | agtgactgtaattagtatca C/G ttgtgcacagagaaaaaatg | 1528 | | |
| ABCB11 | 34 | intron10 + 3623 | tgcagaaggttgttctttca T/C gaccttcctgagtttcagaa | 1529 | | |
| ABCB11 | 35 | intron10 + 3661 | gaattcattaataaaaataa A/T cacataatggagcgtgacat | 1530 | | |
| ABCB11 | 36 | intron10 + 5100 | gggccactctttggcttggc A/G atagactgtggccaatgaaa | 1531 | | |
| ABCB11 | 37 | intron10 + 5292 | gctatttggtaggaacatct G/A ggcatgatcaggtagccttc | 1532 | | |
| ABCB11 | 38 | intron10 + 5912 | gagtaatattcagtaaaaaa A/Δ taaagtggtattttaaatca | 1533 | | |
| ABCB11 | 39 | intron12 + 116 | tgtttccagtaatagggaat G/A gaggtgtctttctctgaaag | 1534 | | |
| ABCB11 | 40 | intron12 + 326 | gataaatgacaaggcaatta G/C aacaatcaggaagcacaggt | 1535 | | |
| ABCB11 | 41 | intron12 + 335 | caaggcaattacaacaatca A/G gaagcacaggttcttcccaa | 1536 | | |
| ABCB11 | 42 | intron12 + 2572 | cctcatccttgccaatgttt C/T cttttactggtttttgatgg | 1537 | | |
| ABCB11 | 43 | exon13 + 23 | tctaaatgacctcaacatgg T/C cattaaaccaggggaaatga | 1538 | | |
| ABCB11 | 44 | intron13 + 70 | atggcagtatattgatcaaa C/T agaaaggtgtagcatacatt | 1539 | | |
| ABCB11 | 45 | intron13 + (1578-1579) | ttattggcctctattttttc (C) tgcccattggtcaagtatga | 1540 | | |
| ABCB11 | 45 | intron13 + (1578-1579) | ttattggcctctattttttc tgcccattggtcaagtatga | 1541 | | |
| ABCB11 | 46 | intron14 + 32 | catacattcctgggagaaac C/T aagaggtcatagaaggaaaa | 1542 | | |
| ABCB11 | 47 | intron14 + 80 | cacaattatacacatttctt C/T tcgtatgattcccaagtcat | 1543 | | |
| ABCB11 | 48 | intron14 + 439 | tattgtgtcaaaaacaattc A/G ttgtatatctccattctaag | 1544 | | |
| ABCB11 | 49 | intron14 + (1262-1263) | cagcctttgcattatatttt (T) gctgtgttgtctaacaggag | 1545 | | |
| ABCB11 | 49 | intron14 + (1262-1263) | cagcctttgcattatatttt gctgtgttgtctaacaggag | 1546 | | |
| ABCB11 | 50 | intron14 + 1283 | gctgtgttgtctaacaggag A/C aaagagacacggatttgctc | 1547 | | |
| ABCB11 | 51 | intron14 + 1339 | tgagatagatatttaggacc G/A tgaccaatttttattttggt | 1548 | | |
| ABCB11 | 52 | intron14 + 1359 | gtgaccaatttttattttgg T/C tgaaaaatcttatttgaagt | 1549 | | |
| ABCB11 | 53 | intron14 + 1480 | tattgattagacaataaccc G/A tctggggaagggatatttct | 1550 | | |
| ABCB11 | 54 | intron15 + 370 | ccttttctaatgtctgcaca G/A cctatttaagaatattccca | 1551 | | |
| ABCB11 | 55 | intron16 + (550-559) | aaagtttagtgtttctatca (T)9-12 gctacttctgatggacttct | 1552 | | |
| ABCB11 | 56 | intron17 + 188 | tttctctccccaattcatgg T/G tttttggttagcttctcatc | 1553 | | |
| ABCB11 | 57 | intron17 + 194 | tccccaattcatgggttttt T/G gttagcttctcatcttcttg | 1554 | | |
| ABCB11 | 58 | intron17 + (197-198) | caattcatgggttttgggtt (T) agcttctcatcttcttgggg | 1555 | | |
| ABCB11 | 58 | intron17 + (197-198) | caattcatgggtttttggtt agcttctcatcttcttgggg | 1556 | | |
| ABCB11 | 59 | intron17 + (289-296) | ttagaaaggggacttctttt (A)7g(A)4 tctgtgtttagtgttcctct | 1557 | | |
| ABCB11 | 59 | intron17 + (289-296) | ttagaaaggggacttctttt (A)12 tctgtgtttagtgttcctct | 1558 | | |
| ABCB11 | 59 | intron17 + (289-296) | ttagaaaggggacttctttt (A)10 tctgtgtttagtgttcctct | 1559 | | |
| ABCB11 | 60 | intron17 + 1070 | tcagacttgggttttcctat C/T tttcttcttgagaacaagtt | 1560 | | |
| ABCB11 | 61 | intron17 + 1651 | tgttaaaatatctcattgta T/C atgctgacggatttttcttg | 1561 | | |
| ABCB11 | 62 | intron17 + 2226 | ccttaagtctcctcctatca T/A gcaccttgttctcaccagct | 1562 | | |
| ABCB11 | 63 | intron17 + 2979 | ctctctcttcctttctcagc T/Δ ctactatttcactgttggct | 1563 | | |
| ABCB11 | 64 | intron17 + 3288 | aatccccatatcctacctta T/G ccatctcatccatgaatctt | 1564 | | |
| ABCB11 | 65 | intron17 + 3289 | atccccatatcctaccttag C/T catctcatccatgaatcttg | 1565 | | |
| ABCB11 | 66 | intron18 + 97 | aatatgagttttctaggtat A/G tatctagcagtgtttcaagt | 1566 | | |
| ABCB11 | 67 | intron18 + 98 | atatgagttttctaggtata T/C atctagcagtgtttcaagtc | 1567 | | |
| ABCB11 | 68 | intron18 + 892 | ctctgaaagttagtgataca C/T cttatttgtgtttgaatcaa | 1568 | | |
| ABCB11 | 69 | intron18 + 2681 | atgtatgagatcaagtcagg A/G tcaaatattagacacccata | 1569 | | |
| ABCB11 | 70 | intron18 + 3780 | ggaccatcctgtggggcaat C/G gttccagaaaatgctggtat | 1570 | | |
| ABCB11 | 71 | intron18 + 5741 | ctcaccggtataaatacaac C/T gtagcaaaggttttcttttt | 1571 | | |
| ABCB11 | 72 | intron18 + (5882-5883) | tgcgtattccctcagttcag (C) tttttattcaagccacagca | 1572 | | |
| ABCB11 | 72 | intron19 + (5882-5883) | tgcgtattccctcagttcag tttttattcaagccacagca | 1573 | | |
| ABCB11 | 73 | intron21 + 10022 | tggctaagttaaaaaaaaaa A/Δ gagattcaactataattgct | 1574 | | |
| ABCB11 | 74 | intron22 + 322 | caagattcaatactgccccc C/Δ agggggtgggtgaacagggc | 1575 | | |
| ABCB11 | 75 | intron22 + 257 | ctgttcaatttcctctcgca T/C agtgattcattccacattcc | 1576 | | |
| ABCB11 | 76 | intron22 + 552 | taattaatatcttgtccttg G/C ggggtaaatgagggatggta | 1577 | | |
| ABCB11 | 77 | intron22 + 569 | ttggggggtaaatgagggat G/A gtagcataaacacttctcaa | 1578 | | |
| ABCB11 | 78 | 3′flanking + 243 | aaacaccacagaatgacata G/A aactacaggcggcaggaatc | 1579 | | |
| CYP4B1 | 1 | 5′flanking − 333 | gaaacattcacagtgcttgt A/T tgagaagacagtggttatta | 1580 | | |
| CYP4B1 | 2 | 5′flanking − 18 | gagcagctgaaggcaggtca G/T atgaaggctaggtggctgga | 1581 | | |
| CYP4B1 | 3 | intron1 + 341 | tccaaaacctctggatagta C/T atagaagtaggcaatccatt | 1582 | | |
| CYP4B1 | 4 | intron1 + 542 | cctatgggtggctcaggagc C/T gtgacaccttcccaggttca | 1583 | | |
| CYP4B1 | 5 | intron1 + 2856 | gaggactttgcacatagtag G/A tgctcagctatattgttggc | 1584 | | |
| CYP4B1 | 6 | intron1 + 6086 | tttggaatctaaagactggg G/T cacgatgctagttgtgtgac | 1585 | | |
| CYP4B1 | 7 | intron1 + 6598 | ttttggggtgtggggagagg G/A cccatagtagggagacagct | 1586 | | |
| CYP4B1 | 8 | intron1 + 6660 | acctaagggtgtccatcctg A/G aggagagcagtcctaggggg | 1587 | | |
| CYP4B1 | 9 | intron1 + 7242 | ccctggtctcccttaactca T/C gctggactgttccctttggt | 1588 | | |
| CYP4B1 | 10 | intron2 + 107 | gcctgtgtactaagtctgcg C/G agctgaggttcccaccctac | 1589 | | |
| CYP4B1 | 11 | intron3 + 361 | atggtgtggtggtaggacca C/T ggctggtcaccagaggctgt | 1590 | | |
| CYP4B1 | 12 | intron4 − 492 | aaaggctttcacatctaaaa C/A gtgtctcctcattttctgtc | 1591 | | |
| CYP4B1 | 13 | intron4 − 315 | ggattacttacatatacacc A/G tgcgggggagctcaccacct | 1592 | | |
| CYP4B1 | 14 | intron4 − 157 | ctacccaccctatcctgata T/C tccagcaggatggagggcag | 1593 | | |
| CYP4B1 | 15 | exon5 + 22 | acaagtgggaagagaaagct C/T gggagggtaagtcctttgac | 1594 | | |
| CYP4B1 | 16 | intron5 + 125 | cccagggagccttagcttgc G/A gggagacaggacctgctcat | 1595 | | |
| CYP4B1 | 17 | intron5 + (287-289) | tgtctaagccaatccctcct CCT/Δ accctctgcttagcagggac | 1596 | | |
| CYP4B1 | 18 | intron6 + 54 | gcctgggttcctcctcctgg C/T ccctctatgccccctcccat | 1597 | | |
| CYP4B1 | 19 | intron7 + (99-100) | agctcttaagcatttccccc (TC) tttcctcagcaaatataacc | 1598 | | |
| CYP4B1 | 19 | intron7 + (99-100) | agctcttaagcatttccccc tttcctcagcaaatataacc | 1599 | | |
| CYP4B1 | 20 | exon8 + 114 | tcctggtttctctactgcat G/A gccctgtaccctgagcacca | 1600 | | |
| CYP4B1 | 21 | exon8 + 139 | tgtaccctgagcaccagcat C/T gttgtagagaggaggtccgc | 1601 | | |
| CYP4B1 | 22 | intron8 + 247 | agaaagttgtcaacaagagg C/T tgatattttgtgtgctaact | 1602 | | |
| CYP4B1 | 23 | intron8 + 366 | tgtgggggtgaacagagctg A/G gacagctgggagagccagtt | 1603 | | |
| CYP4B1 | 24 | intron8 + 650 | cctttgcttgtggtcagaca C/A cctgcctttctctctgggct | 1604 | | |
| CYP4B1 | 25 | intron8 + 844 | tcatatgtgagaatcccccc C/A ccacggggtatccagacaca | 1605 | | |
| CYP4B1 | 26 | intron8 + 1767 | tcccattccaagaatgttct G/T gttgtgttgctggcagggat | 1606 | | |
| CYP4B1 | 27 | exon9 + 53 | tgtgcatcaaggagagcttc C/T gcctctacccacctgtgccc | 1607 | | |
| CYP4B1 | 28 | intron9 + 652 | agtcggatgtggtcatgaac G/T ctctgtcactggcagtggtc | 1608 | | |
| CYP4B1 | 29 | intron9 + 774 | cctggtcaccaacctctgtt C/T tgcccacaggaagcctgatc | 1609 | | |
| CYP4B1 | 30 | intron10 + 33 | tgggctgggagatcagacag G/T gtgggggactgggagggtca | 1610 | | |
| CYP4B1 | 31 | exon12 + 224 | ccagatggctcaggctgtga C/A ctccctgggcaccaccctcc | 1611 | | |
| CYP4B1 | 32 | exon12 + 270 | ctgggtgtggaggagttggg G/A ccccctgccttcaggaggct | 1612 | | |
| CYP4B1 | 33 | 3′flanking + 129 | tctgtgtctcacagtcacgt G/A gtgctccaggcattcagggt | 1613 | | |
| CYP27A1 | 1 | intron1 + 295 | aggagggagctgtcttggga A/G gagagtggcagaggcaaatg | 1614 | | |
| CYP27A1 | 2 | intron1 + 17503 | cagtgcataaagcctctgat C/T ctccttagagaaggagggac | 1615 | | |
| CYP4F2 | 1 | intron1 + (145-146) | ccaagcccctggcaacctca CA/Δ gtgattcaggctgggccttt | 1616 | | |
| CYP4F2 | 2 | intron1 + 193 | tttaatcagtctctctctct C/T tttcccattctaagtgctta | 1617 | | |
| CYP4F2 | 3 | intron1 + 324 | ccctgctctacctccggcac T/C gcccgtccctgcctctccac | 1618 | | |
| CYP4F2 | 4 | intron1 + 367 | tccctggaggtccctgggcc G/C ttctctgggcctcaggatct | 1619 | | |
| CYP4F2 | 5 | intron1 + 402 | ggatctcaccgtccatcccg T/C gcccgtccctgcctctccac | 1620 | | |
| CYP4F2 | 6 | exon2 + 35 | gcctgtcctggctgggcctc T/G ggccagtggcagcatcccct | 1621 | | |
| CYP4F2 | 7 | exon2 + 166 | cggtgtttcccacaaccccc A/G agacggaactggttttgggg | 1622 | | |
| CYP4F2 | 8 | intron2 + 125 | ggcagagaagcagaggaggc A/G tcttactcattcctctgctt | 1623 | | |
| CYP4F2 | 9 | intron2 + 440 | gggccgtctcccacttccac T/C acacccgaaggcacctttct | 1624 | | |
| CYP4F2 | 10 | exon3 + 48 | gttctgactcagctggtggc C/T acctacccccagggctttaa | 1625 | | |
| CYP4F2 | 11 | intron3 + 701 | agactccaccccagcttggg T/A ccctttccttgacccctgtg | 1626 | | |
| CYP4F2 | 12 | intron3 + 742 | cttcccatcgttggacgggc G/A aggctgagcagggggaatgg | 1627 | | |
| CYP4F2 | 13 | intron3 + 1020 | gctttagctttctccatgtc G/A cttttcctatcaaggtggcc | 1628 | | |
| CYP4F2 | 14 | intron3 + 1039 | cgcttttcctatcaaggtgg C/A cttttcctcatgatgtcaac | 1629 | | |
| CYP4F2 | 15 | intron3 + 1040 | gcttttcctatcaaggtggc C/G ttttcctcatgatgtcaacg | 1630 | | |
| CYP4F2 | 16 | intron3 + 1920 | ccacctgtctaacctctgtt G/C ctgtttgctcatgtctgggg | 1631 | | |
| CYP4F2 | 17 | intron3 + 1945 | ttgctcatgtctggggcgtg T/ ctctacaaatggctgttatat | 1632 | | |
| CYP4F2 | 18 | intron3 + 2621 | agcattctgtagaatgctga G/A ctgtgctcaggggttgcgga | 1633 | | |
| CYP4F2 | 19 | intron3 + 2665 | tgttggatcgtgtaggaggc A/G tgtcaaggcatgctggaacc | 1634 | | |
| CYP4F2 | 20 | intron6 + 194 | gggtttgaactggtgggtgt G/T gtcagagctctgtaggggac | 1635 | | |
| CYP4F2 | 21 | intron7 + 67 | tgtgaaatgtcagatgaaag G/A atttgaacttgattaagagg | 1636 | | |
| CYP4F2 | 22 | intron7 + 2811 | ttccaagggaaattgccatt T/G aattctcctgtaactcaggt | 1637 | | |
| CYP4F2 | 23 | intron7 + (3096-3097) | ggggtgggggttgggggggg (G) ttactgccttctctccagga | 1638 | | |
| CYP4F2 | 23 | intron7 + (3096-3097) | ggggtgggggttgggggggg ttactgccttctctccagga | 1639 | | |
| CYP4F2 | 24 | intron8 + 145 | ggtgctgtctaccttcgggt G/A ctgaagcagcccagagaccc | 1640 | | |
| CYP4F2 | 25 | exon9 + 44 | ctctcctgggtcctgtacca C/T cttgcaaagcacccagaata | 1641 | | |
| CYP4F2 | 26 | exon11 + 48 | gaacccatcacaacctagct G/A tgtggccggaccctgaggtg | 1642 | | |
| CYP4F2 | 27 | intron12 + 108 | tggtccaagttccagctctc C/T ttccctcacctcctctggag | 1643 | | |
| CYP4F2 | 28 | intron12 + 285 | gcatggggatccaggcacgg A/T tacccccttctctattcctc | 1644 | | |
| CYP4F2 | 29 | exon13 + 238 | aagtgaagcctagaattacc C/A taagaccctgttccacagtc | 1645 | | |
| CYP4F2 | 30 | exon13 + 342 | tgtgcgtgaatgttcatggc G/A gccctattcacagtagccaa | 1646 | | |
| CYP4F2 | 31 | exon13 + 563 | tagtgtactgtccttttata T/C gaaatttccagaacaggcca | 1647 | | |
| CYP4F2 | 32 | exon13 + 707 | aaatgttccggacctagata G/C tgacgaaggtagcacgacac | 1648 | | |
| CYP4F3 | 1 | intron2 + 258 | cattaatgcacctctgcggg G/T ctcttgggcagggggttggg | 1649 | | |
| CYP4F3 | 2 | intron2 + 916 | ttagggacatgtcctgagtc C/T acactgctccccacaaacct | 1650 | | |
| CYP4F3 | 3 | intron2 + 3417 | atccaggtctcacacagtgt C/T acttcctctcttggctttag | 1651 | | |
| CYP4F3 | 4 | intron2 + 4090 | gagagcatgaattgggtcct G/A tgtctttctctccagattca | 1652 | | |
| CYP4F3 | 5 | intron3 + 89 | tgtgctgcctccagcgggtc G/A cgtgcccatgtgcagacagg | 1653 | | |
| CYP4F3 | 6 | intron3 + 243 | tcaagtctgctgtacggcta C/T gtcttgtcacctgtatattt | 1654 | | |
| CYP4F3 | 7 | intron3 + 502 | aggtctgggacccagggtcc G/C taagtgaactgtctgagaca | 1655 | | |
| CYP4F3 | 8 | intron3 + 755 | ttttgtggccatgtcaggac A/T tgtgaacacatgtcagtgtc | 1656 | | |
| CYP4F3 | 9 | intron3 + 855 | gggacagacagggtgtccta G/A gtccttgtgaaggcattctg | 1657 | | |
| CYP4F3 | 10 | intron3 + 970 | cctgacatagctcctacgtg C/T catgttaggcagtgtcattg | 1658 | | |
| CYP4F3 | 11 | intron6 + 122 | gaggagttgttatacctgat C/T gttgaaggactggtatgaat | 1659 | | |
| CYP4F3 | 12 | exon7 + 159 | ggtgcacgacttcacagatg C/A cgtcatccaggagcggcgcc | 1660 | | |
| CYP4F3 | 13 | intron7 + 2107 | caggttgccagtgatttttt T/Δ ctcagaaagtttcatcaag | 1661 | | |
| CYP4F3 | 14 | intron7 + 2255 | gaccaagaagggtctaggag T/A gcaagatgggcttgggtttc | 1662 | | |
| CYP4F3 | 15 | intron8 + 132 | cctcaatgcaaggttgctgt A/C caccctcgggtgctgaagca | 1663 | | |
| CYP4F3 | 16 | exon9 + 59 | taccaccttgcaaagcaccc G/A gaataccaggagcgctgtcg | 1664 | | |
| CYP4F3 | 17 | intron9 + 13 | attgaatggtgagtgcaggt G/A ctggtgccctgttcctgagc | 1665 | | |
| CYP4F3 | 18 | intron9 + 36 | ggtgccctgttcctgagcct G/C tctcattggctctgttcccc | 1666 | | |
| CYP4F3 | 19 | intron9 + 167 | acccatcctgactgtctggg C/G aaaggttataggcccttagg | 1667 | | |
| CYP4F3 | 20 | intron9 + 369 | tccctaattcctacccttcc G/A tccagtccagggatttataa | 1668 | | |
| CYP4F3 | 21 | intron9 + 458 | tcattcatccatccagtcct T/C gttcagcaaatactctcata | 1669 | | |
| CYP4F3 | 22 | intron10 + 46 | ctcctgggtaggaagagggg A/C ccctcaggcagggagcattg | 1670 | | |
| CYP4F3 | 23 | intron10 + 63 | gggcccctcaggcagggagc C/A ttgtcctgactgcccccttc | 1671 | | |
| CYP4F3 | 24 | intron11 + 14 | ccctgaggtgcgggcccccc C/G tctctgtttttgtccattcc | 1672 | | |
| CYP4F3 | 25 | intron11 + 84 | gatcaggagaatccaacatc G/A cctccctccaagacacacac | 1673 | | |
| CYP4F3 | 26 | intron11 + 113 | caagacacacaccactgtct T/C tccaaggctggcggactggg | 1674 | | |
| CYP4F3 | 27 | intron11 + 164 | cggcaacccttcttggtctc T/G cctccaggtctatgacccct | 1675 | | |
| CYP4F3 | 28 | intron11 + 165 | ggcaacccttcttggtctcg T/C ctccaggtctatgacccctt | 1676 | | |
| CYP4F3 | 29 | intron12 + 156 | gaaaaggcccacagagtagg G/A ttgggttggtcctagaagga | 1677 | | |
| CYP4F3 | 30 | intron12 + 253 | gagctcggctaggctcgcag G/T atatgcaagcccacatgggg | 1678 | | |
| CYP4F3 | 31 | intron12 + 346 | tgggtgtcccaggccaggtt G/A ttgggttggtcctagaagga | 1679 | | |
| CYP4F8 | 1 | 5′flanking − 61 | accatgtttacccatcattg G/T tcctggagctccccagcccc | 1680 | | |
| CYP4F8 | 2 | exon1 + 67 | gtggcagcatccccgtggct G/T ctcctgctggtggtcggggc | 1681 | | |
| CYP4F8 | 3 | intron1 + 707 | tacgcagcaggtattcacca T/G tatttccacattatccactg | 1682 | | |
| CYP4F8 | 4 | intron1 + 857 | acaccccctaccctcacatc G/A tgacacagctgggccagaag | 1683 | | |
| CYP4F8 | 5 | intron1 + 907 | tgccatctccaccctccccc G/A tgcaggggcatcttctttat | 1684 | | |
| CYP4F8 | 6 | intron1 + 668 | tgtggcacttccaccatatg T/C tcattgccctcttgctccag | 1685 | | |
| CYP4F8 | 7 | intron2 + 818 | gccacagagaccatggctca G/A gccccaaaatgctgagtgac | 1686 | | |
| CYP4F8 | 8 | intron2 + 1079 | tatgcttgggtgttgcagaa C/T atgttggaccatgtaggagc | 1687 | | |
| CYP4F8 | 9 | intron2 + 1194 | ccggtcccctttatgccccc C/A accctcctttcttcttctgc | 1688 | | |
| CYP4F8 | 10 | intron5 + 45 | aacatgggatggagtggggg G/T gtgggtgtggggagagcaaa | 1689 | | |
| CYP4F8 | 11 | exon8 + (19-20) | ggccatgacaccacggccag (GCCAG) tggcctctcctgggtcttgt | 1690 | | |
| CYP4F8 | 11 | exon8 + (19-20) | ggccatgacaccacggccag tggcctctcctgggtcttgt | 1691 | | |
| CYP4F8 | 12 | intron8 + 222 | tttatttccccactaacttg C/G tatgcaagcttagtaaaatc | 1692 | | |
| CYP4F8 | 13 | intron8 + 334 | cttggagaattaacggcaaa A/T accgcaatgacttttggacc | 1693 | | |
| CYP4F8 | 14 | intron8 + 1999 | ttctaagtacatttattctc T/C tgcttttagctatgatctag | 1694 | | |
| CYP4F8 | 15 | intron8 + 4184 | caggagggccgtgtatgctc C/T ctggataattgttgggttgt | 1695 | | |
| CYP4F8 | 16 | exon9 + 119 | acgtggtgctcccagacagc C/T gagtcatccccaaaggtgcc | 1696 | | |
| CYP4F8 | 17 | intron11 + 282 | gggttgggggttccgggcct G/C gttcctggcgcagtggggcc | 1697 | | |
| CYP4F8 | 18 | intron11 + 340 | tgcagtcagaccttccacct C/T ggcccccaggaactgcatcg | 1698 | | |
| CYP4F8 | 19 | 3′flanking + 35 | atcacctacctttgcaccaa T/C taccttttcagatttccggt | 1699 | | |
| CYP4F8 | 20 | 3′fanking +3083 | ctgtgttggcccctgtgcct G/C agtcccgcggatggccagta | 1700 | | |
| CYP4F8 | 21 | 3′flanking + 90 | ggcccctgtgcctcagtccc A/G cggatggccagtagggggcg | 1701 | | |
| ALDH1 | 1 | intron1 + 564 | cattatttcttcagccaagt T/C tgttgccattggagcagatg | 1702 | | |
| ALDH1 | 2 | intron1 + 710 | gttctgagagtaactctgaa C/T tttgcctgtttcacactgct | 1703 | | |
| ALDH1 | 3 | intron1 − 3868 | ccctttttatatccagaata C/G agcctaaacttctttctctg | 1704 | | |
| ALDH1 | 4 | intron2 + 2933 | taagtatgctatactatatt T/C gatagatatactatactata | 1705 | | |
| ALDH1 | 5 | intron2 − 1646 | caatgtgattaactgaatgc C/T gcaaatatgcactgtatatg | 1706 | | |
| ALDH1 | 6 | exon3 + 54 | caggcttttcagattggatc C/T ccgtggcgtactatggatgc | 1707 | | |
| ALDH1 | 7 | intron3 + 157 | taggccccttaacattgaac T/G attctcaaatagtaatctgc | 1708 | | |
| ALDH1 | 8 | intron3 + 339 | tgagtctcctagaatgatat G/A ttaggtttattcaagcattt | 1709 | | |
| ALDH1 | 9 | intron3 + 655 | agcagttagatgagtcagag C/A ataatatagttgggggaggg | 1710 | | |
| ALDH1 | 10 | intron3 + 735 | gaagccaatttaacataaac C/A aataccaagatcaggtttca | 1711 | | |
| ALDH1 | 11 | intron3 + 863 | gcaagtatggttaatcaaag G/A accatttattactcaaatct | 1712 | | |
| ALDH1 | 12 | intron3 + 1757 | agatgacaagatttcttcta T/A ttcaaaaattccctagcaca | 1713 | | |
| ALDH1 | 13 | intron5 + 90 | ttctctaaaacagatggatg C/A ttatgtatttgttaaatgtg | 1714 | | |
| ALDH1 | 14 | intron6 + 213 | caggaagccaaacacaaagg T/C ttggtgtcaaacagtcaact | 1715 | | |
| ALDH1 | 15 | intron6 + 1323 | ttttgaattaaattcttata C/T tgtaacttttaaacttttta | 1716 | | |
| ALDH1 | 16 | intron7 + 638 | gcaaaagacagtggtggaag C/A atactgtaccatgcaaaaaa | 1717 | | |
| ALDH1 | 17 | intron9 + (1462-1463) | aatggcattctatgtttttt (T) gttgtgattatttatctatc | 1718 | | |
| ALDH1 | 17 | intron9 + (1462-1463) | aatggcattctatgtttttt gttgtgattatttatctatc | 1719 | | |
| ALDH1 | 18 | intron9 + 1757 | tgatctagaatttagtttct A/G taaatgaatagaatccagtg | 1720 | | |
| ALDH1 | 19 | intron12 − 1383 | aatcccacttattactctcc T/G gagagcttcaagtgcctata | 1721 | | |
| ALDH1 | 20 | 3′flanking + 40 | ttttaagtacaagttttggt T/C acagtgatttcttcttgtca | 1722 | | |
| ALDH2 | 1 | intron3 + 1766 | aaattggtggctcatcctgc C/Δ tggccgcccttcctcctcctc | 1723 | | |
| ALDH2 | 2 | intron8 + 52 | gaaggtagccctggccacct G/C tgttgtggctccagccgatc | 1724 | | |
| ALDH2 | 3 | intron8 + 69 | cctgtgttgtggctccagcc G/A atcctgtcgcccccccagtg | 1725 | | |
| ALDH2 | 4 | intron9 + 5197 | gctttcttatgaccttggtc C/A atttcccagttgtcttgttg | 1726 | | |
| ALDH2 | 5 | intron11 + 114 | gagctgggctcagtttctcc T/C gggtcagggtgtgatgtcga | 1727 | | |
| ALDH2 | 6 | 3′flanking + 411 | ggatatgatttctgcccctc T/C tctgctgtgggtaaacagct | 1728 | | |
| ALDH2 | 7 | 3′flanking + (432-433) | tctgctgtgggtaaacagct TC/Δ tgtttcatgcatttactttt | 1729 | | |
| ALDH2 | 8 | 3′flanking + 488 | ccaataagaatgtgcttgaa G/T gtttcatgcatttaatttgt | 1730 | | |
| ALDH7 | 1 | 5′flanking − 1455 | ctgcctgtccacacccacag C/T agcttgcacatcatccccac | 1731 | | |
| ALDH7 | 2 | intron1 + 464 | catgaatgactctgggaaag A/G atcattcttagcaatggact | 1732 | | |
| ALDH7 | 3 | intron1 + 2269 | aaatggaatccaaacagcaa G/C agacctcccctcaccggtca | 1733 | | |
| ALDH7 | 4 | intron2 + 1349 | actgagcttctgccaccggc C/T gcctgccggccttcatgaga | 1734 | | |
| ALDH7 | 5 | intron2 + 1820 | tccgtgtggaaggcaccttc C/G cccagcctcagtggctagga | 1735 | | |
| ALDH7 | 6 | intron2 + 2046 | aacctcaggcgctgcctcag C/G cagggagccagcctggcccc | 1736 | | |
| ALDH7 | 7 | intron2 + 2939 | aagcacgcactgaacatgga G/A tgagtgagtgaacgaatgaa | 1737 | | |
| ALDH7 | 8 | intron3 + 7 | tgcccaagaacctggtgagc C/T ggccgggctgaggcgggcag | 1738 | | |
| ALDH7 | 9 | intron4 + 36 | gccccttccggtcacccttc T/C ccgctcgaggcctcagggcc | 1739 | | |
| ALDH7 | 10 | intron6 + (116-117) | attctcctctctctctctct CT/Δ ggaccaggctgggagcagtc | 1740 | | |
| ALDH7 | 11 | intron6 + 263 | cagaccctcatacgtgaccc T/C gctgccccccaggctcttag | 1741 | | |
| ALDH7 | 12 | intron6 + 1298 | gtagacagagctggactcca T/G ccttgggtgataagggatcc | 1742 | | |
| ALDH7 | 13 | intron6 + 1411 | gccagggtcacaagcagagg C/T gggaggagccaaggggtttg | 1743 | | |
| ALDH7 | 14 | exon7 + 185 | acctgcgtggcccccgacta C/T gtcctatgcagccctgagat | 1744 | | |
| ALDH7 | 15 | exon7 + 339 | tgcgggcattgctgggctgc G/A gcgtgtggccattgggggcc | 1745 | | |
| ALDH7 | 16 | intron7 + 249 | ccagggctccagggctcagc G/A tgctaagatgaactcccatc | 1746 | | |
| ALDH7 | 17 | intron7 + 277 | atgaactcccatcccaccac C/T ggctatcctgaaaggctgta | 1747 | | |
| ALDH7 | 18 | intron7 + 498 | gaccaaggtcgggggattct C/T tgtgtcccacaggccctgag | 1748 | | |
| ALDH7 | 19 | intron8 + 14 | cagccaggtgggggtgcggc C/T gggctgggcagggtcaggag | 1749 | | |
| ALDH7 | 20 | intron8 + 49 | caggagcccgcagtgggcag C/T acaagtggtggcagcagggg | 1750 | | |
| ALDH7 | 21 | intron8 + 111 | tcaggactttgggatggtgg A/T cctcttggctctgtctctgc | 1751 | | |
| ALDH7 | 22 | intron8 + 3219 | atcctgatggggctcaaggc A/G gcctcacgcacatcctgttc | 1752 | | |
| ALDH7 | 23 | exon9 + 33 | gtgctgacccagaccagcag G/T gggggcttctgtgggaacga | 1753 | | |
| ALDH7 | 24 | intron9 + 948 | tcccaggcccccgagctgac C/A cttcttggtggccgtggccc | 1754 | | |
| ALDH7 | 25 | intron9 + 1067 | aggctccccaagcctgggtc C/T ctcttgcccccacccactct | 1755 | | |
| ALDH7 | 26 | exon10 + 137 | ccgcaatcgccgcgccgcct G/A aggatgctgctggtggccat | 1756 | | |
| ALDH7 | 27 | exon10 + 397 | cgctcccaaccatgagagcc G/A aggatgctgctggtggccat | 1757 | | |
| ALDH7 | 28 | exon10 + 1198 | ctcttccccatgctgctcat C/T ctcctgggccccatccactc | 1758 | | |
| ALDH7 | 29 | exon10 + 1475 | caggggtggacctgagtttc G/A tctcctgtctctctggctga | 1759 | | |
| ALDH7 | 30 | 3′flanking + 15 | cctggcaatacttacatctc A/G gtgatttgctttctgtgcat | 1760 | | |
| ALDH7 | 31 | 3′flanking + 60 | caacaggactctggaccaag G/C ccctggcgttgggtaacaat | 1761 | | |
| ALDH8 | 1 | intron1 + 98 | agggaaggggatgtgtgccc G/A tggccgtgggtcaggggggc | 1762 | | |
| ALDH8 | 2 | intron1 + 157 | atggctgcaggggccatggg T/C acggggcttgctcaggagag | 1763 | | |
| ALDH8 | 3 | intron1 + 354 | tctgtggacagacaaggatt C/G ggtcgggggcaccagggctg | 1764 | | |
| ALDH8 | 4 | intron1 + 851 | tatgacaggtccatcaggcc T/G caccttcctgtgtgtcttat | 1765 | | |
| ALDH8 | 5 | intron1 + 894 | ctcagcatctgcccccacag T/G gcttttgcacacgttggttc | 1766 | | |
| ALDH8 | 6 | intron1 − 463 | aaagaaccctccgagtccct C/G gtttagtcccagaagggagg | 1767 | | |
| ALDH8 | 7 | exon2 + 61 | gccttcaactgagggcgcac G/A cggccggccgagttccgggc | 1768 | | |
| ALDH8 | 8 | intron2 + 8 | ggacctgcataaggtgggcc A/G tggagagtgggccccggcag | 1769 | | |
| ALDH8 | 9 | intron2 + 23 | gggccgtggagagtgggccc G/C ggcaggggctggagcagcgt | 1770 | | |
| ALDH8 | 10 | intron2 + (180-181) | ttcactcctgaacactcaca (A) gccaccctgtgatgcaggct | 1771 | | |
| ALDH8 | 10 | intron2 + (180-181) | ttcactcctgaacactcaca gccaccctgtgatgcaggct | 1772 | | |
| ALDH8 | 11 | exon8 + 72 | gactacgctctcaagaacct T/G caggcctggatgaaggatga | 1773 | | |
| ALDH8 | 12 | intron8 + 375 | ctgcagcatcctaacctcac C/T gtcgcgactcaaggctgccg | 1774 | | |
| ALDH8 | 13 | intron8 + 463 | aatcacccccatggcacccc G/A accgtcactgagagggtgct | 1775 | | |
| ALDH8 | 14 | exon9 + 33 | atgctggagcggaccagcag C/A ggcagctttggaggcaatga | 1776 | | |
| ALDH8 | 15 | exon10 + 428 | aggtgtcctcactcacccca C/T cctccccaattccagccctt | 1777 | | |
| ALDH9 | 1 | exon1 + 121 | actgtgtggggtatggcggg G/A tggtggggagaatgtggtgt | 1778 | | |
| ALDH9 | 2 | intron1 + 67 | cgcggatttcccggccagcc C/G ccgtttcctgtgttctgcag | 1779 | | |
| ALDH9 | 3 | intron1 + 103 | tgcagcgttgacttgagcac A/G agacagtgacagtggagagt | 1780 | | |
| ALDH9 | 4 | intron1 + 1818 | gaatttttgagaaaaaaaaa A/Δ tgttcctttagggttgcctt | 1781 | | |
| ALDH9 | 5 | intron2 + 5891 | tcaggaacaggaagtaaaga G/A gtttccatttctaaatttct | 1782 | | |
| ALDH9 | 6 | intron2 + 6398 | atcaaaaacacttgtctgat T/G atcgtgctctgaacctgcct | 1783 | | |
| ALDH9 | 7 | intron2 + 9677 | atgacgctgagtttggtgct A/G ttcttttgtttttcttgcct | 1784 | | |
| ALDH9 | 8 | intron2 + 9991 | gggagaagtgagggacctac C/T cttggcttctaatctttcat | 1785 | | |
| ALDH9 | 9 | intron2 + 10198 | ttgtcagagacatctttgat A/G atccttacgtactatatcag | 1786 | | |
| ALDH9 | 10 | intron2 + 10258 | ttagtagataactttttttt T/Δ gtaaggatggagaataatag | 1787 | | |
| ALDH9 | 11 | intron2 + 11382 | catattcaattcttttatgt T/C ctttagaccaaagaaaggca | 1788 | | |
| ALDH9 | 12 | intron2 + 11455 | taaacctttaagctcatcat C/T ggaccatctattgaatttct | 1789 | | |
| ALDH9 | 13 | intron2 + 12044 | atttaaagtgaaagctattt C/T tagttttaaaaattgagcag | 1790 | | |
| ALDH9 | 14 | intron3 + 334 | ctatttagcaaacttttttt T/Δ gacagtgtataaagttttca | 1791 | | |
| ALDH9 | 15 | intron3 + 368 | gttttcaacaattgatattg G/Δ aaggttggtagggcctagga | 1792 | | |
| ALDH9 | 16 | intron4 + 191 | ccctcaaggagcttatagtt T/A aggttgtacacaatcatgtc | 1793 | | |
| ALDH9 | 17 | intron4 + 557 | tagaaaaaattgtaatgtta A/G aaagcattactgttaggaca | 1794 | | |
| ALDH9 | 18 | intron5 + 830 | agttcaagatgattttgtag G/C ttcagggcctagttgactta | 1795 | | |
| ALDH9 | 19 | intron5 + 838 | atgattttgtaggttcaggg C/T ctagttgacttagcatgcaa | 1796 | | |
| ALDH9 | 20 | intron6 + 120 | agaaaagttgcacaaatagt A/C caaagaattcccatgtacct | 1797 | | |
| ALDH9 | 21 | intron6 + 2569 | attaaaatctgctttaaata T/C ttttttgggggagaggacac | 1798 | | |
| ALDH9 | 22 | intron7 + 1414 | ccgatcttcaaaaaattagc T/C gggggtggtggtgcacactg | 1799 | | |
| ALDH9 | 23 | intron8 + 664 | aaagttcacatttttttttt T/Δ ataacttcatggtcaagagc | 1800 | | |
| ALDH9 | 24 | intron8 + 2170 | taatgcacacattttttttt T/Δ cttcatagggacatccaacg | 1801 | | |
| ALDH9 | 25 | exon11 + 587 | aaaacaaaaaacaaaaaaaa A/Δ ccttgttcctttataggttc | 1802 | | |
| ALDH10 | 1 | intron1 + 39 | gggtgtggggaaactggccc C/T cgccgcgcacttgtggactg | 1803 | | |
| ALDH10 | 2 | intron3 + 2491 | tgccgcgaagaaattggcac T/A gctgagttctacatgcagtt | 1804 | | |
| ALDH10 | 3 | intron3 + 2595 | ttctgtacatcaacttgtga T/A ggattgaggccagttctggt | 1805 | | |
| ALDH10 | 4 | intron3 + 2775 | taccgctttgcccctgacca G/A gggtaaattcttcaataact | 1806 | | |
| ALDH10 | 5 | intron3 + 3424 | aggcacttctgcacacaccc G/A cgtctcatgcattttccctg | 1807 | | |
| ALDH10 | 6 | intron3 + 3676 | atgttgaagagattgctgat G/A ttagacgttcggatttattt | 1808 | | |
| ALDH10 | 7 | intron4 + 481 | tagaaaataagaggtttcag G/T ttctctctgctaaatccggt | 1809 | | |
| ALDH10 | 8 | intron4 + 769 | atcctgctttatacctgaac G/A tcttgcaggcagagccaaaa | 1810 | | |
| ALDH10 | 9 | intron4 + 796 | aggcagagccaaaagccaca A/G ccaggagagtctgtaccgaa | 1811 | | |
| ALDH10 | 10 | intron5 + 254 | attagttgtggcatatactt T/G ttttaaaaaagttaaataat | 1812 | | |
| ALDH10 | 11 | intron6 + 137 | aatcctgctttctggtatac T/C gtacctgtagcttttgttat | 1813 | | |
| ALDH10 | 12 | intron6 + 923 | aggctaatgaatggtaagag G/A aaggggctatcctgattagc | 1814 | | |
| ALDH10 | 13 | intron7 + 331 | tgcttttctgatgttaatcc A/Δ cagggcattgctgaataaca | 1815 | | |
| ALDH10 | 14 | intron8 + 643 | tttagaacatgacctgcctg C/T ctctcccacatgtgagatga | 1816 | | |
| ALDH10 | 15 | intron8 + 666 | ctcccacatgtgagatgact G/A actcagctttttatttctcc | 1817 | | |
| ALDH10 | 16 | intron9 + 2129 | tgttttcatttttaaaaaaa G/T gtttgactttggaattcatg | 1818 | | |
| ALDH10 | 17 | exon10 + (1894-1895) | ttggcttgtctactaataca CA/Δ tctgcttcaaaatgaacata | 1819 | | |
| ALDH10 | 18 | 3′flanking + 31 | gtatttgtcaactttttttt T/Δ ctcattttaaaattcttagc | 1820 | | |
| ALDH10 | 19 | 3′flanking + 106 | gtgtgttgggggtggtggtt G/A gtagctatagtaaataggtt | 1821 | | |
| ALDH10 | 20 | 3′flanking + 1630 | aaaagcacgtgggaaacaca A/G ttaatcatgtcttaccgtat | 1822 | | |
| ABCC7 | 1 | 5′flanking − 834 | gctaaaacactccaaagcct T/G ccttaaaaatgcgcactggg | 1823 | | |
| ABCC7 | 2 | 5′flanking − 729 | cctccttgcagatttttttt T/Δ ctctttcagtacgtgtccta | 1824 | | |
| ABCC7 | 3 | exon1 + 125 | tagcagggaccccagcgccc G/C agagaccatgcagaggtcgc | 1825 | | |
| ABCC7 | 4 | intron1 + 5200 | ctatgtgagacgttaagaag G/A tagaggtggccaagaaggaa | 1826 | | |
| ABCC7 | 5 | intron1 + 7538 | agttctctttcttagcatgg C/A ctacagaggtgcaactacct | 1827 | | |
| ABCC7 | 6 | intron1 + 13519 | gaaacttaaatcttgagtca T/C acaattgtgtctacatactg | 1828 | | |
| ABCC7 | 7 | intron1 + 14110 | attacacagtattttttttt T/Δ ctctttcagtacgtgtccta | 1829 | | |
| ABCC7 | 8 | intron1 + 14293 | gccaggcagattcctgactc C/Δ tataacccagagcttatcag | 1830 | | |
| ABCC7 | 9 | intron1 + 14316 | taacccagagcttatcagag C/G atttatgtccccaaagagaa | 1831 | | |
| ABCC7 | 10 | intron1 + 14433 | cagaataacaatgatggctc G/A gaaaaatatgggtatttctg | 1832 | | |
| ABCC7 | 11 | intron1 + 14824 | acgttttgacagttgcacaa G/C tttctttctttaagctttaa | 1833 | | |
| ABCC7 | 12 | intron1 + 23401 | aatatttttgaaaatcacta C/G ggtatcctgcatagtgattt | 1834 | | |
| ABCC7 | 13 | intron3 + 879 | gaaaaatttcagttcataca C/A ccccatgaaaaatacattta | 1835 | | |
| ABCC7 | 14 | intron3 + 922 | acttatcttaacaaagatga G/C tacacttaggcccagaatgt | 1836 | | |
| ABCC7 | 15 | intron3 + 933 | caaagatgagtacacttagg C/T ccagaatgttctctaatgct | 1837 | | |
| ABCC7 | 16 | intron3 + 13704 | tttttccaaataaaaaaaaa A/Δ tcaggtgatatctgtaaatg | 1838 | | |
| ABCC7 | 17 | intron3 + 13758 | tattaaagaacatgatgctt A/G aaacagattagggaaaacta | 1839 | | |
| ABCC7 | 18 | intron4 + 240 | ctctgttgtagttttttttt T/Δ ctcctaatcatgttatcatt | 1840 | | |
| ABCC7 | 19 | intron4 + 376 | ttatgttcagcaagaagagt A/G taatatatgattgttaatga | 1841 | | |
| ABCC7 | 20 | intron4 + 586 | tgtccagacaagagaccaaa T/C tgccgaggcatcatttaggt | 1842 | | |
| ABCC7 | 21 | intron4 + 1089 | tttcaatctgaacattttac G/A taagtgaagactttgttaga | 1843 | | |
| ABCC7 | 22 | intron4 + 1615 | aaagttaggtggtattgtat C/T tgtcttcctttctcaatgtt | 1844 | | |
| ABCC7 | 23 | intron4 + 1946 | aatacaaacaaacttgagct T/C tgcctatacttttcaagaat | 1845 | | |
| ABCC7 | 24 | intron6 + 783 | tatctaagttttggagtcaa A/G tagcactttgtttgaatccc | 1846 | | |
| ABCC7 | 25 | intron6 + (1128-1131) | gattgattgattgattgatt GATT/Δ tacagagatcagagagctgg | 1847 | | |
| ABCC7 | 26 | intron7 + (731-732) | gtagcaatgagaccattttt (T) cttcagttgagctccatgtt | 1848 | | |
| ABCC7 | 26 | intron7 + (731-732) | gtagcaatgagaccattttt cttcagttgagctccatgtt | 1849 | | |
| ABCC7 | 27 | intron7 + 1434 | gaatgtttggttgtaacctg T/C ataatctggcatgaaattgt | 1850 | | |
| ABCC7 | 28 | intron1 + 752 | catgctctcttctcagtccc A/G ttccttcattatatcaccta | 1851 | | |
| ABCC7 | 29 | intron8 + 1109 | tatggccaagacttcagtat G/A cgtggacttaattcttcctt | 1852 | | |
| ABCC7 | 30 | intron8 + 1312 | atgaagacattcattttttt T/Δ ctccgtccaatgttggatta | 1853 | | |
| ABCC7 | 31 | intron9 + (6521-6522) | gtgtgtgtgtgtgtgtgtgt (GT) ttttttaacagggatttggg | 1854 | | |
| ABCC7 | 31 | intron9 + (6521-6522) | gtgtgtgtgtgtgtgtgtgt ttttttaacagggatttggg | 1855 | | |
| ABCC7 | 32 | intron10 + 2119 | gaacactttatagttttttt T/G ggacaaaagatctagctaaa | 1856 | | |
| ABCC7 | 33 | intron11 + 3867 | tttttcttcaagaaattaga A/Δ gaggggagaaattggtttaa | 1857 | | |
| ABCC7 | 34 | intron11 + 11844 | tgaatcaaaatcatctaaaa A/Δ gctttcagaaaccagacttt | 1858 | | |
| ABCC7 | 35 | intron11 + 12144 | atattaaacagagttacata T/C acttacaacttcatacatat | 1859 | | |
| ABCC7 | 36 | intron11 + 20975 | gtgtggatagtaaatgccag G/A gtaaatcacatagcatctaa | 1860 | | |
| ABCC7 | 37 | intron11 + 27057 | atggaagagaagttttagta G/A aggggaggaaggaggaggtg | 1861 | | |
| ABCC7 | 38 | intron11 + 27131 | gagagagacttttttttttt T/Δ aaggcgagagtttactacct | 1862 | | |
| ABCC7 | 39 | intron13 + 152 | gtattaactcaaatctgatc T/A gccctactgggccaggattc | 1863 | | |
| ABCC7 | 40 | intron13 + 287 | tttgcagtatcattgccttg T/C gatatatattactttaatta | 1864 | | |
| ABCC7 | 41 | intron15 + (85-86) | atacatatatatgcacacac AT/Δ aaatatgtatatatacacat | 1865 | | |
| ABCC7 | 42 | intron15 + 106 | taaatatgtatatatacaca T/A gtatacatgtataagtatgc | 1866 | | |
| ABCC7 | 43 | intron15 + 3341 | ggaagtataaatttgtaaat A/C actgagacccaaacttacaa | 1867 | | |
| ABCC7 | 44 | intron15 + 5556 | tgctattgactaatagtaat A/T attttagggcagctttatga | 1868 | | |
| ABCC7 | 45 | intron15 + 5919 | tggtagttctatgtggaaac C/A gtgaggaaataattttatat | 1869 | | |
| ABCC7 | 46 | intron17 + 2479 | caaaaaggtatggaagtcag A/C ggagaaggagacccctatgt | 1870 | | |
| ABCC7 | 47 | intron18 + 81 | acgtatgcaaaaaaaaaaaa A/Δ gaaataactcactgacacac | 1871 | | |
| ABCC7 | 48 | intron19 + 751 | cattaataaaataacaaatc A/G tatctattcaaagaatggca | 1872 | | |
| ABCC7 | 49 | intron19 + 820 | tgacatttgtgatatgatta T/C tctaatttagtctttttcag | 1873 | | |
| ABCC7 | 50 | intron21 + 1532 | ttacctttaacttttttttt T/Δ agtttgatcagctctcttta | 1874 | | |
| ABCC7 | 51 | intron21 + 1607 | atgcttttggagttgggtct C/T ataaatgtatagaaatgttt | 1875 | | |
| ABCC7 | 52 | intron21 + 11260 | atgtggaacaatcatgacta T/C atgccttttactttctctat | 1876 | | |
| ABCC7 | 53 | intron22 + (130-131) | agaatcaatattaaacacac AT/Δ gtttattatatggagtcat | 1877 | | |
| ABCC7 | 54 | intron23 + 1828 | ctgtcctaaagtttaaaaag A/Δ aaaaaaaaaaggaagaaggaa | 1878 | | |
| ABCC7 | 55 | intron24 + (7100-7112) | cctttacaaactcttagaca (T)12-14 agtttaacatgttacaaaac | 1879 | | |
| ABCC7 | 56 | intron25 + 237 | actcttcccccttgtcaaca C/T atgatgaagcttttaaatac | 1880 | | |
| ABCC7 | 57 | intron27 + 115 | gggtgaagctctttccccac C/T ggaactcaagcaagtgcaag | 1881 | | |
| ABCC7 | 58 | intron27 + 334 | ggatgaattaagtttttttt T/Δ aaaaacgccccatttggtaa | 1882 | | |
| ABCC8 | 1 | 5′flanking − 1099 | aaaggggctgaaggggtctt T/C cttttgtgttcccctgactg | 1883 | | |
| ABCC8 | 2 | 5′flanking − (424-422) | caccccaccaccaccaccac CAC/Δ aaggtaacgttctgccccac | 1884 | | |
| ABCC8 | 3 | intron1 + 1212 | agcctgggcaacatagtgag A/G ccccccccgccctttctaca | 1885 | | |
| ABCC8 | 4 | intron2 + 1003 | aggaggactgtgaatcccag C/A ctgcatgtttgggtcggatt | 1886 | | |
| ABCC8 | 5 | intron2 + 1253 | catctcactaaggaagaatc C/T agtaaccagcaaggatgaga | 1887 | | |
| ABCC8 | 6 | intron2 + 1382 | cccagactgcactcctgcag T/C gctgcctggctcctgtagtt | 1888 | | |
| ABCC8 | 7 | intron2 + 2371 | tttcagagctgtctggaaat T/A tagggggcaggtgggagggg | 1889 | | |
| ABCC8 | 8 | intron3 + 1957 | ccctacccctagcccagggg C/T ccccacatgagtatgaatgg | 1890 | | |
| ABCC8 | 9 | intron3 + (2088-2089) | agagaacccttcattaacca (CCA) gggcgtggctgaccagtgtc | 1891 | | |
| ABCC8 | 9 | intron3 + (2088-2089) | agagaacccttcattaacca gggcgtggctgaccagtgtc | 1892 | | |
| ABCC8 | 10 | intron3 + 2204 | taaagcacaagttatcaccc G/A tggatggatttgtccttttc | 1893 | | |
| ABCC8 | 11 | intron3 + 2286 | ttatctccccttgaaaggac A/G ctccacagagccagaaattc | 1894 | | |
| ABCC8 | 12 | intron3 + 2312 | cagagccagaaattctagaa C/G agggaaaagtggaggggagg | 1895 | | |
| ABCC8 | 13 | intron3 + 2358 | ctgtgaactgcagggacaga A/G ggaaatgggtattgggagaa | 1896 | | |
| ABCC8 | 14 | intron3 + 2359 | tgacctgcagggacagaagg A/C aatgggtattgggagaatgg | 1897 | | |
| ABCC8 | 15 | intron3 + 2370 | gacagaaggaaatgggtatt G/A ggagaatggccagccctcca | 1898 | | |
| ABCC8 | 16 | intron3 + 2382 | tgggtattgggagaatggcc A/G gccctccaaggggctgatgt | 1899 | | |
| ABCC8 | 17 | intron3 + 4910 | ggggacagccttcagctgtg G/A aattcctccagtcctagaga | 1900 | | |
| ABCC8 | 18 | intron3 + 4969 | cattattccagtcctgaggc A/G tgagagcagaaggccgatgc | 1901 | | |
| ABCC8 | 19 | intron3 + 5003 | ccgatgcttctgccctccat C/G ctaatgtcctcctgcaggga | 1902 | | |
| ABCC8 | 20 | intron3 + 5019 | ccatcctaatgtcctcctgc A/C gggacccaaggtggatggca | 1903 | | |
| ABCC8 | 21 | intron4 + 14 | ggtgagggtaagcaggccac C/T tgggccagggtggggtggga | 1904 | | |
| ABCC8 | 22 | intron4 + 187 | agacactgcatctggcccac G/A tgtgctctaccccagggtcc | 1905 | | |
| ABCC8 | 23 | intron4 + 204 | cacgtgtgctctaccccagg G/C tcccagagggagaggggggt | 1906 | | |
| ABCC8 | 24 | intron4 + 254 | gttcgctgaggttggcggat G/A actttccgtagaaagggaag | 1907 | | |
| ABCC8 | 25 | intron4 + 357 | tgtattcatatcgtcacgct G/C gtaaatgaatgagtaagtgt | 1908 | | |
| ABCC8 | 26 | intron5 + 92 | ggcattaggtcaaaatcctg G/A tgggacaaaaggggaaactg | 1909 | | |
| ABCC8 | 27 | intron6 + 4205 | tctgtagaaagtacatgggg G/A catgaagatcattggcttga | 1910 | | |
| ABCC8 | 28 | intron6 + 5519 | gattcccagggaatgttaaa A/C aggaccgggtcttcctaaac | 1911 | | |
| ABCC8 | 29 | intron6 + 5575 | tctgacccagtaccagccag G/C gggcaagtttccatcccccc | 1912 | | |
| ABCC8 | 30 | intron6 + 5587 | gttgccatctgagatcttgc C/T ggaagtacacaagagaccct | 1913 | | |
| ABCC8 | 31 | intron6 + 6747 | ttccactggccttttctgct C/T agtaattgctacattacagg | 1914 | | |
| ABCC8 | 32 | intron9 + 191 | gaggaagctgcctcccggtg A/G ggacaggaagcgggcatggc | 1915 | | |
| ABCC8 | 33 | intron10 + 1963 | cccaggagtccaacctccct T/G tgtccagctagaccatggtg | 1916 | | |
| ABCC8 | 34 | intron10 + 2724 | cctgggacatgttttcttat A/G taaaacagcatcaaagatgt | 1917 | | |
| ABCC8 | 35 | intron10 + 2938 | gcccgcccaggactcctcac G/C tgtcaaagtcacctagggag | 1918 | | |
| ABCC8 | 36 | intron10 + 3094 | tccgaggatgtgtttttttt T/Δ ccctccgttagtcagcagtg | 1919 | | |
| ABCC8 | 37 | intron10 + 3368 | tcctgctcatatgcggcacc A/G tcagacttctgggcaggcaa | 1920 | | |
| ABCC8 | 38 | intron10 + 8897 | ggtattgattaaaagcctca C/T gggcagagaaattcgccatc | 1921 | | |
| ABCC8 | 39 | intron11 + 308 | tgtgtattgtagaagtgatg G/A gaaatccagaacagaaagct | 1922 | | |
| ABCC8 | 40 | intron11 + 1171 | gccctctcatttcccttcca G/A tgctgagcgtttccagtgtg | 1923 | | |
| ABCC8 | 41 | exon12 + 7 | gcctctgtccacagactttc G/A tgggccacgtcagcttcttc | 1924 | | |
| ABCC8 | 42 | intron12 + 356 | accaagaatgaggccatccc G/T tccccacgtggctgccccat | 1925 | | |
| ABCC8 | 43 | intron12 + 934 | tgggttcaaagatggaatgg G/T gcataactcagcaaaattat | 1926 | | |
| ABCC8 | 44 | intron12 + 1370 | gggagggaggctggacaggg C/G atgaaggcagagcctggtgg | 1927 | | |
| ABCC8 | 45 | intron15 + 412 | ggaggtgggacccaggatgg C/T gtttcttgggaccacaagga | 1928 | | |
| ABCC8 | 46 | intron15 + 688 | actcccccggccccactcac A/G tctgccaccttccctccctg | 1929 | | |
| ABCC8 | 47 | intron16 + 4464 | actcattccaagtattgatc G/A agaagagaggtaggtactgg | 1930 | | |
| ABCC8 | 48 | intron16 + 4574 | ttgaagatcttaagttgttt T/C tggttcactcatttcgcaaa | 1931 | | |
| ABCC8 | 49 | intron16 + 5011 | agctaaaagcaaaacagcct C/T tgacctggcaagcattccca | 1932 | | |
| ABCC8 | 50 | intron16 + 7608 | tgtcctacttttcttttgac C/G cttataacttcctgacttcg | 1933 | | |
| ABCC8 | 51 | intron16 + 7730 | ccagctcctagtgggctgga G/A ggaaggacatgcggttgggg | 1934 | | |
| ABCC8 | 52 | intron16 + 8369 | ttgcaaactgagttagggcc T/C ggagagcttactgtgtgctg | 1935 | | |
| ABCC8 | 53 | intron16 + 9708 | tgcacttgccgcctacttat T/G ccagacccaatgattgggtc | 1936 | | |
| ABCC8 | 54 | intron17 + 651 | tatagattaatgaggctctg A/G gtccctcaaaaccttccctc | 1937 | | |
| ABCC8 | 55 | intron17 + 692 | cccttacctctccaaaaaac A/G cttgagataccctagaggtg | 1938 | | |
| ABCC8 | 56 | intron17 + 1541 | ctcaggatcttcctggagga C/T atggttcactcccatgagag | 1939 | | |
| ABCC8 | 57 | intron18 + 580 | actaagcagatttctaccaa C/T tgcacctccccatccccttg | 1940 | | |
| ABCC8 | 58 | intron18 + 658 | gaacaagcccctgagaatgc C/T ttccgcaccccctactcccg | 1941 | | |
| ABCC8 | 59 | intron18 + 660 | acaagcccctgagaatgcct T/C ccgcaccccctactcccgcc | 1942 | | |
| ABCC8 | 60 | intron19 + 93 | gcccttccatcgatcaccca T/C acccagccatctcactcccc | 1943 | | |
| ABCC8 | 61 | intron19 + 123 | tctcactccccaggtgctta T/C ctgcactccagcctctccat | 1944 | | |
| ABCC8 | 62 | intron19 + 219 | cataggggagagggcaggaa C/T ggagggaagggagagagccc | 1945 | | |
| ABCC8 | 63 | intron19 + 845 | tagtatttaacctgcccaaa C/T gctgtgtgaagtgctgacct | 1946 | | |
| ABCC8 | 64 | intron20 + 338 | tcccctccacaagcttagac A/G aacaggattctcctgtgact | 1947 | | |
| ABCC8 | 65 | exon21 + 10 | tttggtgacagggcatcaac C/T tgtctggtggtcaacgccag | 1948 | | |
| ABCC8 | 66 | intron21 + 192 | caaggatagcacaaatgacc C/Δ attgcagacttcagatggag | 1949 | | |
| ABCC8 | 67 | intron23 + 17 | gaaggtgggtatatccaggg A/G tggccaagcagccacccctg | 1950 | | |
| ABCC8 | 68 | intron23 + 67 | gttctgctagaacctgaact G/T ataaaggtcttcctgtcctt | 1951 | | |
| ABCC8 | 69 | intron26 + 268 | gtgagcgtctgcacatccaa G/C taaagattgttttctcctcc | 1952 | | |
| ABCC8 | 70 | intron26 + 308 | cgataagtgggtgtaatttg C/T ccatccccacccatgagtcc | 1953 | | |
| ABCC8 | 71 | intron26 + 348 | cagctccctgccctcccctc A/G ctctctctccctcagccagc | 1954 | | |
| ABCC8 | 72 | intron26 + 807 | gacagctgctgagtcaggcc G/A agccggcagctgagaaaggc | 1955 | | |
| ABCC8 | 73 | intron26 + 834 | cagctgagaaaggcggcagt G/C gtcagatgggcttgagaaac | 1956 | | |
| ABCC8 | 74 | intron26 + (118-121) | cctccaaaaaataaaaacaa AAAA/Δ cagaaatgaaggaaatagaa | 1957 | | |
| ABCC8 | 75 | intron28 + 1348 | tggggtaagcggaagacggg G/A ttgaacgctttgagtttggt | 1958 | | |
| ABCC8 | 76 | intron29 + 1253 | ctcttagggatcttgtctaa G/T taaagaagagcagagcaaag | 1959 | | |
| ABCC8 | 77 | intron29 + 1589 | cagatcccagcttcctgtaa A/G cagcctcagatcaggccaaa | 1960 | | |
| ABCC8 | 78 | intron29 + 2322 | gcgcctcacactcctataac G/A cgcacatgccctgatgcaca | 1961 | | |
| ABCC8 | 79 | intron29 + 2348 | atgccctgatgcacacacat T/C ttcaacacgcacttactcta | 1962 | | |
| ABCC8 | 80 | intron29 + 2418 | agacacgtcaccctcccaca C/T gtctccaccctgggggtgtg | 1963 | | |
| ABCC8 | 81 | intron29 + 2494 | tcagtcccctcagacacatg C/A cctctctccacgcagagaca | 1964 | | |
| ABCC8 | 82 | intron29 + 2735 | gcggccaaggagagtgatga C/T ggcagcccaggttgatcaga | 1965 | | |
| ABCC8 | 83 | intron30 + 386 | gctcctggggctccagcctt C/T gcagcccttgtgtgtgtctg | 1966 | | |
| ABCC8 | 84 | intron33 + 93 | ggcttcgcagtcacctcgtg G/T ccctccagggccgaggcctc | 1967 | | |
| ABCC8 | 85 | intron33 + 358 | agggacctgggggcagacag C/T gaggccacccttgtattgag | 1968 | | |
| ABCC8 | 86 | intron38 + 54 | cccagggacaggactggcct G/C ttgtggccgtcatcagtgca | 1969 | | |
| ABCC8 | 87 | intron38 + 466 | aggacattctggccacatgc C/Δ tcatcctcctcctccaagcc | 1970 | | |
| ABCC8 | 88 | intron38 + 529 | tggcccccaccgcgggtggt A/G ttcccaccatcctgacccgc | 1971 | | |
| ABCC9 | 1 | intron3 + 38 | tgttgtttctccttaaagag C/A tatttgtttttccccccaaa | 1972 | | |
| ABCC9 | 2 | intron3 + 305 | gctggccttctggcttgcag T/A agttgtattttaagaatcag | 1973 | | |
| ABCC9 | 3 | intron3 + 320 | tgcagaagttgtattttaag A/G atcagagctcttgtgaggag | 1974 | | |
| ABCC9 | 4 | intron3 + 631 | ttctgtggaaatcagaggct G/C tctaaaatattcctaatttt | 1975 | | |
| ABCC9 | 5 | intron3 + 8644 | tggacgactcaacatttttc A/G agttattactccttcaactc | 1976 | | |
| ABCC9 | 6 | intron4 + 757 | aggatatcatgaaacactga A/C tcttagtaaaaactatcttt | 1977 | | |
| ABCC9 | 7 | intron4 + 1022 | tactgtggaatttttcttgc A/C acagagatatgtatttttca | 1978 | | |
| ABCC9 | 8 | intron5 − 1217 | cagtggtagatgtgttttct A/G ttgccatcatctacaaatat | 1979 | | |
| ABCC9 | 9 | intron6 + (106-107) | tatgagttgttcaaataggc (T)7-9 cagagaattgaatgctttct | 1980 | | |
| ABCC9 | 10 | intron6 + 1347 | tcagtcgtattcctactaaa A/Δ caaaattttgtaagttatgt | 1981 | | |
| ABCC9 | 11 | intron6 + 1618 | ctttttatttgctgcttacc G/A ttttactaaggttggatata | 1982 | | |
| ABCC9 | 12 | intron6 + 1835 | cttttaataaatgcaaactg C/T acacctggtctataaaaaga | 1983 | | |
| ABCC9 | 13 | intron7 + 407 | cctatagaatttttcttttc T/G tttttctcaaaaaaattaaa | 1984 | | |
| ABCC9 | 14 | intron7 + 423 | tttctttttctcaaaaaaaa C/T taaatgtttgttatttattt | 1985 | | |
| ABCC9 | 15 | intron3 + 743 | ttctgtagatgaagcttaag A/T gctagatcttatttgaaaaa | 1986 | | |
| ABCC9 | 16 | intron8 + 850 | tttttaacttattgtttgcc T/G tttcattttttaatagaaaa | 1987 | | |
| ABCC9 | 17 | intron9 + 585 | cgaatttgctgcttttagag A/T aatctttgcaaataataaaa | 1988 | | |
| ABCC9 | 18 | intron9 + 1394 | atttttcttcttgtaagtat G/C agtgatagagctgactgcag | 1989 | | |
| ABCC9 | 19 | intron12 + 1167 | atttgtaagacttttaaaat G/A agataattgtgctggtgtct | 1990 | | |
| ABCC9 | 20 | intron12 + 1195 | tgtgctggtgtctatatctt A/G ctgagaaaactagaatttat | 1991 | | |
| ABCC9 | 21 | intron12 + 2123 | ataagtgctctcccagtgtt G/A attggacttagagcattttc | 1992 | | |
| ABCC9 | 22 | intron12 + (2853-2856) | caaaacagaataatgaaaag TAAC/Δ tattatctaaaataataaaa | 1993 | | |
| ABCC9 | 23 | intron13 + (3043-3044) | aacatactctcctcctctct (CTCTTT) aagtcaaaatatattagtat | 1994 | | |
| ABCC9 | 23 | intron13 + (3043-3044) | aacatactctcctcctctct (CT) aagtcaaaatatattagtat | 1995 | | |
| ABCC9 | 23 | intron13 + (3043-3044) | aacatactctcctcctctct aagtcaaaatatattagtat | 1996 | | |
| ABCC9 | 24 | intron14 + 85 | ttctgtgaaagtgtcccaaa T/A tgtgcctttaaattgttttt | 1996 | | |
| ABCC9 | 25 | intron14 + 275 | agtgtcacagtgtatttttc T/C ggtattcctatgtttatcaa | 1997 | | |
| ABCC9 | 26 | intron14 + 453 | ctcattcaaaacttggctat T/C tggactctccccaggcattg | 1998 | | |
| ABCC9 | 27 | intron14 + 3709 | atcccctagtgatgtacact G/A agcttgcctccatctttcct | 1999 | | |
| ABCC9 | 28 | intron14 + 3813 | ctgatttatatattagctga C/T tttccaagttcagacatcta | 2000 | | |
| ABCC9 | 29 | intron14 + 4000 | ttcttttacttcaatgtagc A/Δ ccaaatcagaaggtgacatt | 2001 | | |
| ABCC9 | 30 | intron16 + 1466 | atcccactggatttaattac A/C ttgtgtagcttgtacaacca | 2002 | | |
| ABCC9 | 31 | intron16 + 5357 | attttggaagagaaattata T/G aaccttccacaactgaattt | 2003 | | |
| ABCC9 | 32 | intron17 + 1368 | aatcctggtgtttttttttt T/Δ ctttttcatttttcagtagg | 2004 | | |
| ABCC9 | 33 | intron20 + 98 | aagtaactcaaggaaagatg G/A tttaacttgtgaaatcgtaa | 2005 | | |
| ABCC9 | 34 | intron22 + 28 | ctcatagttcagaagagttc A/C gagcccaattcagaagagtt | 2006 | | |
| ABCC9 | 35 | intron22 + 194 | tgaacctataaaattctaat G/Δ ccatctttggatgaggtgca | 2007 | | |
| ABCC9 | 36 | intron22 + 1370 | ccagggacaaaagaagatga C/T gtaaacttaaggattgggac | 2008 | | |
| ABCC9 | 37 | intron22 + 1487 | agcaagccaggaagaaagtc C/G attaagttgtatttagaaat | 2009 | | |
| ABCC9 | 38 | intron23 + (455-462) | atagccatgaaggataagaa AATTAGAA/Δ tgccatttgt | 2011 | | |
| | | | tatgtttcag | | | |
| ABCC9 | 39 | intron24 + (460-465) | aactctttctcttcatctgc TTTAAAA/TTTTAA gcaagccttg | 2012 | | |
| | | | aaggagagtg | | | |
| ABCC9 | 40 | intron24 + 595 | gcatgcaaaataatgaagaa A/G acaatcttgtctgacattga | 2013 | | |
| ABCC9 | 41 | intron28 − 926 | aaatatttcagaatttgggg G/A tgtagagcatttgccgtcat | 2014 | | |
| ABCC9 | 42 | intron29 + 2692 | cttgtaagtctttttttttt T/Δ aaagtaatgaaaattctaa | 2015 | | |
| ABCC9 | 43 | intron29 + 5464 | agacaacactgcttttttgt G/A tgttcacaattcaacgacag | 2016 | | |
| ABCC9 | 44 | intron29 − 1830 | aactggctgaaaggaaaaaa A/T tcatattgctgtaaatattt | 2017 | | |
| ABCC9 | 45 | intron31 + 102 | tgcttttgctttccacttca G/A tatccagaaaactctctcat | 2018 | | |
| ABCC9 | 46 | intron33 + 877 | aacatggaactatagtaaat A/G tagtttttttggggttcaga | 2019 | | |
| ABCC9 | 47 | intron36 + 1281 | aatttacacttttttttttt T/Δ gcaggagaatattttgcaaa | 2020 | | |
| ABCC9 | 48 | 3′flanking + 197 | aatggagctcatgcatgtgt T/G ttcaaatatatacatgcaaa | 2021 | | |
| CES1 | 1 | 5′flanking − 983 | tatttccttagccagcggta T/C cacagtgtgtttagtgaatt | 2022 | | |
| CES1 | 2 | 5′flanking − 814 | tcacattgccttgacatcac A/C cctactgctcctccacccta | 2023 | | |
| CES1 | 3 | 5′flanking − 248 | agtcctgcaagggtgacacc G/Δ ttatgccacaagcagttggg | 2024 | | |
| CES1 | 4 | intron1 + 22 | tgagtccttctgaagtcaaa T/Δ atgcggggcactttttgaaa | 2025 | | |
| CES1 | 5 | intron1 + 30 | tctgaagtcaaatatgcggg G/T cactttttgaaatccttgtt | 2026 | | |
| CES1 | 6 | intron1 + 1662 | aagggaatccctgagctgag C/A atgaccagcccagtggtttc | 2027 | | |
| CES1 | 7 | intron1 + 1726 | cctccctgaagtcctcagca A/C tcttagctggttcctcgccc | 2028 | | |
| CES1 | 8 | intron1 + 2716 | tgcttccaaggaagttcatc T/G cagtattatttgtaattagc | 2029 | | |
| CES1 | 9 | intron1 + (2747-2749) | tgtaattagcaacaacaaca AAA/Δ gaaaagaagctaaatattga | 2030 | | |
| CES1 | 10 | intron1 + 3288 | ttatttgtccattaaagaaa A/Δ ctcaagcgcttagcctggca | 2031 | | |
| CES1 | 11 | intron1 + 3691 | gagaatatgggacacccctt T/G ttcatcctctcatccagcat | 2032 | | |
| CES1 | 12 | intron1 + 3819 | tccttcttgcatttattttt A/G gctggatgtttttatgcctc | 2033 | | |
| CES1 | 13 | intron1 + 3880 | aaccagctcaatgggttagg G/A aggacattgatcgtcatccc | 2034 | | |
| CES1 | 14 | intron2 + 74 | gagtcaaggcagtcccctga T/C gggctgatcctttgctctgg | 2035 | | |
| CES1 | 15 | intron2 + 552 | atggaaggtgtgtccattca C/A cctggccaagctgggaagaa | 2036 | | |
| CES1 | 16 | intron2 + 885 | cagtattttagatggtaaag T/C attatgatgtaatatattgt | 2037 | | |
| CES1 | 17 | intron2 + 2001 | ttggcatgtcagggctgcaa G/A actcatgtagaaatcactcc | 2038 | | |
| CES1 | 18 | intron3 + 2119 | cgctgagtgcatgaatagtc T/C aggcttgagggtgatgggag | 2039 | | |
| CES1 | 19 | intron4 + 127 | taaggcatccaagccccttc G/A taattggacactacctaccc | 2040 | | |
| CES1 | 20 | intron4 + 347 | tctgtcatgacacttagcag T/G cagcccagcaggtgaaggtt | 2041 | | |
| CES1 | 21 | intron4 + (1984-1985) | tgtggtcctgaaggtcctgc (C) tgacatctctgctccccacc | 2042 | | |
| CES1 | 22 | intron4 + (1984-1985) | tgtggtcctgaaggtcctgc tgacatctctgctccccacc | 2043 | | |
| CES1 | 22 | intron5 + 766 | gaggtgggcagagggtcagc T/C cactactggattcctcagtc | 2044 | | |
| CES1 | 23 | intron5 + 825 | ggagtagatctagcctggaa T/G agcgagtgagtcactgaccc | 2045 | | |
| CES1 | 24 | intron5 + 828 | gtagatctagcctggaatag C/T gagtgagtcactgaccccac | 2046 | | |
| CES1 | 25 | intron5 + 868 | ctcctgagcatgaactctcc T/A cccctccactctgctgtcag | 2047 | | |
| CES1 | 26 | intron7 + 68 | acttcttcatttcagctgtc C/G tcttgcccagggacagtttc | 2048 | | |
| CES1 | 27 | intron7 + 681 | cctccaaaatcaacaatcca A/G ttatcgcctgtctgctagtt | 2049 | | |
| CES1 | 28 | intron7 + 885 | aggaactatccaaagagaaa T/C acattcatatacttcgcagg | 2050 | | |
| CES1 | 29 | intron7 + 2151 | gtcgtgtaaactgaaaatct C/G aggagttgatggcttcaggc | 2051 | | |
| CES1 | 30 | intron7 + 2470 | atatagatatacgaattcac G/A gagtgatgcgggaagaacct | 2052 | | |
| CES1 | 31 | intron8 + 128 | cgtgtttgtttctgaggccc A/C gagaggggtagtgactcacc | 2053 | | |
| CES1 | 32 | intron8 + 2618 | cctgatggcaacacatgagt T/C gggctctctctaatctgtga | 2054 | | |
| CES1 | 33 | intron8 + 2665 | aaaaattattcatcaaaggt G/A aaacctaaaattaagacatg | 2055 | | |
| CES1 | 34 | intron8 + 3785 | ccatggcgcatggccatgcc G/A gtctatggtactggtctcac | 2056 | | |
| CES1 | 35 | intron8 + 3791 | cgcatggccatgccggtcta T/C ggtactggtctcaccctcag | 2057 | | |
| CES1 | 36 | intron10 + 222 | gtgggctggagaagctgcat C/T gctcacccggggctggtggt | 2058 | | |
| CES1 | 37 | intron10 + 230 | gagaagctgcatcgctcacc A/C ggggctggtggtcacttttt | 2059 | | |
| CES1 | 38 | intron11 + 1177 | ctagcaggtgccctgacaca C/G ctttgcacaggaaggggcag | 2060 | | |
| CES1 | 39 | intron11 + 1311 | gccctatgctctgcgtctga A/G ctatatatagagttcccatc | 2061 | | |
| CES1 | 40 | intron11 + 2025 | ttctcatttgggatgctaag A/G ttaaaaattagcataacact | 2062 | | |
| CES1 | 41 | intron11 + 2029 | catttgggatgctaagatta A/C aaattagcataacacttcca | 2063 | | |
| CES1 | 42 | intron11 + 2317 | cattcacaaaagctctttct T/C ctatggttggctctgagttt | 2064 | | |
| CES1 | 43 | intron11 + 3887 | caaatatttggctctaattc C/T gcttccacctcagacagcta | 2065 | | |
| CES1 | 44 | intron12 + 2311 | gcgcctctgggcatctcact G/A tgcatgcttaggcgccttgc | 2066 | | |
| CES1 | 45 | intron12 + 2331 | gtgcatgcttaggcgccttg C/G ggctctgttgtttttcagaa | 2067 | | |
| CES1 | 46 | 3′flanking + 71 | aacggtgatgaaagaggcga T/C gtgagaaggaaggtggcttt | 2068 | | |
| CES1 | 47 | 3′flanking + 362 | ttgcatggcacttactgacc G/A ttgcacaggcctgcaacacc | 2069 | | |
| CES1 | 48 | 3′flanking + 581 | atttctggattctgttagta C/T gtagaaagctctaaagcatg | 2070 | | |
| CES1 | 49 | 3′flanking + 1348 | aaatctgctgctgggagaga G/C agcaaagcatgcagatcaac | 2071 | | |
| ABCB4 | 33 | intron22 + 767 | acagtgggctgatgcataga A/Δ cctgtagcaatccaccagca | 2072 | | |
| AADA | 23 | intron2 + 46 | tgtcactgaggtagttcgca A/G acattttactaagtcttcag | 2073 | | |
| AADA | 24 | 3′flanking + 208 | aatgctaaaaaaaaaaaaaa A/Δ tcactgtggtactttgggga | 2074 | | |
| ABCA4 | 1 | 5′flanking − 1005 | tgccatcataagcagaaact A/C tctctctcttcttggaagct | 2075 | | |
| ABCA4 | 2 | 5′flanking − 819 | gtctagagtctttcaaagag A/T acacattctgagatttgagg | 2076 | | |
| ABCA4 | 3 | 5′flanking − 680 | agcaccaccccattgcaggg C/A tggaatgacagtaatgggcc | 2077 | | |
| ABCA4 | 4 | intron1 + 208 | tgcccttcccaggaagatgt G/A tttctctgtcctcagccaca | 2078 | | |
| ABCA4 | 5 | intron1 + 234 | ctgtcctcagccacatgaaa A/G tcttttgcctaccgtgcctg | 2079 | | |
| ABCA4 | 6 | intron1 + 510 | agctcacgatcaagtcacag T/C ttaactggacacattatttt | 2080 | | |
| ABCA4 | 7 | intron1 + 1527 | gcttaacaaccagcataaaa G/A agagcagcatgggacacgct | 2081 | | |
| ABCA4 | 8 | intron1 + 2077 | caggactgtagctgctggcc T/C aaaatgagcccattcctgtg | 2082 | | |
| ABCA4 | 9 | intron1 + 2174 | ccctctcaatctggcctttc G/C ctggcatgggtgggcgactc | 2083 | | |
| ABCA4 | 10 | intron1 + 2246 | gctcccagggagatggagcc A/G ctcgggctgagggccttggc | 2084 | | |
| ABCA4 | 11 | intron1 + 2364 | ttctgtctggcacgcctccc G/A atggctccccacctgctacc | 2085 | | |
| ABCA4 | 12 | intron1 + 4243 | ctccctggggtatgcctgta C/G gcagttaagcgtcaaggaca | 2086 | | |
| ABCA4 | 13 | intron1 + 4287 | atgccgctctggggagggga A/C gctgagcatgattttggaag | 2087 | | |
| ABCA4 | 14 | intron1 + 4309 | ctgagcatgattttggaagc C/T ggcagaagaggctattgtga | 2088 | | |
| ABCA4 | 15 | intron1 + 4416 | tgcagcaaccgcccccgccc C/T ccgccaaaaacaaacacact | 2089 | | |
| ABCA4 | 16 | intron1 + 4996 | tttacccctggaacaggcag G/A ccaagctggctggtcccctc | 2090 | | |
| ABCA4 | 17 | intron1 + 5007 | aacaggcaggccaagctggc T/C ggtcccctccctgatacaca | 2091 | | |
| ABCA4 | 18 | intron1 + 5080 | gtgtgtggctggtttcttag C/G aagcaccatggttccaagtt | 2092 | | |
| ABCA4 | 19 | intron1 + 5152 | gggagatgaacgtaagtgga G/A ggcaggcctacaaggttgca | 2093 | | |
| ABCA4 | 20 | intron1 + 7110 | ccactggatctgcttttgga A/G tcaagagtccttaagctcca | 2094 | | |
| ABCA4 | 21 | intron1 + 7290 | gatttttgttggctttgcaa T/A ggatcacagtcatttattca | 2095 | | |
| ABCA4 | 22 | intron1 + 7483 | tctgagcctctttccttaac T/C gcagagtgagtggctacaga | 2096 | | |
| ABCA4 | 23 | intron1 + 7497 | cttaactgcagagtgagtgg C/T tacagagaaatctttactac | 2097 | | |
| ABCA4 | 24 | intron2 + 1067 | tcaagcagcagcagcaactg C/A gtggagtcttcttgaactaa | 2098 | | |
| ABCA4 | 25 | intron2 + 1106 | aacactcctatgcccctctc G/A gcacaaaatgacgtgtcccc | 2099 | | |
| ABCA4 | 26 | intron2 + 1119 | ccctctcggcacaaaatgac G/A tgtccccccttgcttcccct | 2100 | | |
| ABCA4 | 27 | intron2 + 1243 | cacccagcacagggactggc A/T cacatgagatgctcctgctt | 2101 | | |
| ABCA4 | 28 | intron3 + 26 | tgttgagatccctaccatgc A/G ggggaggaagttgcacaccc | 2102 | | |
| ABCA4 | 29 | intron3 + 101 | agcatggagcactgagtgtt C/T ttgtggctttgctgagcccc | 2103 | | |
| ABCA4 | 30 | intron3 + 330 | tgcttgggtggagtgaatca T/C tgtaggagaaaaactcagtt | 2104 | | |
| ABCA4 | 31 | intron3 + 470 | tgaagtcaggtttacaaagt C/G aagtttacttcttgggagaa | 2105 | | |
| ABCA4 | 32 | intron3 + 634 | tgaaaaccaatgacccctct T/C ccaagaaaaatggccacata | 2106 | | |
| ABCA4 | 33 | intron3 + 1016 | ccttgggggagctcagtatg A/G ttcttccaggagaagcctgc | 2107 | | |
| ABCA4 | 34 | intron3 + 1554 | gaaagttgggtttcatgttt T/C gcactcacattatgagtgaa | 2108 | | |
| ABCA4 | 35 | intron3 + 1686 | ctagacattctcacagagcc A/G agggcagcaaggcggggctc | 2109 | | |
| ABCA4 | 36 | intron3 + 1823 | ttcacctctctccatggacc A/G gtctcccctgctcctcaatg | 2110 | | |
| ABCA4 | 37 | intron3 + 1938 | caaattcctgggaacaaatc G/A ggttgacccagctttattct | 2111 | | |
| ABCA4 | 38 | intron3 + 1951 | acaaatcgggttgacccagc T/G ttattctccctgtcccatca | 2112 | | |
| ABCA4 | 39 | intron3 + 2063 | ggctgtcagagcctacctgc G/T tgaatgggtggaagggcagg | 2113 | | |
| ABCA4 | 40 | intron3 + 2079 | ctgcgtgaatgggtggaagg G/A caggtctcagagaattgggt | 2114 | | |
| ABCA4 | 41 | intron3 + 2186 | agacacacagagcatgggac C/T gagaggcgagcagaccctgc | 2115 | | |
| ABCA4 | 42 | intron3 + 2214 | gagcagaccctgccaaaact G/A ggagactgaatagatcgctc | 2116 | | |
| ABCA4 | 43 | intron4 + 2717 | cgtgcttctgcacagccacc T/C gggaaggtatgccgatggtt | 2117 | | |
| ABCA4 | 44 | intron4 + 2802 | attctcagcagggaggatta A/G tggtaaaagcccaggaatgg | 2118 | | |
| ABCA4 | 45 | intron4 + 3182 | cccccagagccacagcagcc C/G tgtctcctgggtggtcttgt | 2119 | | |
| ABCA4 | 46 | intron4 + 3515 | agtataataaaagcaggagc C/T atagcccccaactctcaaga | 2120 | | |
| ABCA4 | 47 | intron4 + 3907 | aggggagtgacagtgggcac C/A actctcagggaacccattac | 2121 | | |
| ABCA4 | 48 | intron4 + 3923 | gcaccactctcagggaaccc A/G ttactgtgagagaagccact | 2122 | | |
| ABCA4 | 49 | intron4 + 3952 | agagaagccactgtgccact G/C tgtggtcgaacttcaagacc | 2123 | | |
| ABCA4 | 50 | intron4 + 4125 | ggctgtccagcacacagggg C/A aggcctcttggccactgggg | 2124 | | |
| ABCA4 | 51 | intron4 + 4637 | aatcacttgccccaaggtca C/T cttaactgttaggtgttctt | 2125 | | |
| ABCA4 | 52 | intron4 + 5319 | acctctaggggctcccagag A/G ccccaagaacagaaccttcc | 2126 | | |
| ABCA4 | 53 | intron6 + 2266 | cacccttgcagacctcagac G/A ggtcctgggggcttgctttc | 2127 | | |
| ABCA4 | 54 | intron6 + 2857 | ccagaggagaaagctctgcc G/A tagtcggcctcagttaacca | 2128 | | |
| ABCA4 | 55 | intron6 + 2861 | aggagaaagctctgccgtag T/C cggcctcagttaaccacgga | 2129 | | |
| ABCA4 | 56 | intron6 + 3078 | gcaggcattaaaatgggact T/G tgcctttattgctcctgggc | 2130 | | |
| ABCA4 | 57 | intron6 + 3375 | ttaaatgccaaatgagttct C/G attaacaaagaaagagggaa | 2131 | | |
| ABCA4 | 58 | intron6 + 3412 | ggaaaatctcagtaaaccac C/T gtgacggcatctacccactt | 2132 | | |
| ABCA4 | 59 | intron6 + 4635 | ctttcgggtggatattgcta C/T gtcaagtgtctgggaaagcc | 2133 | | |
| ABCA4 | 60 | intron6 + 5576 | ccactaatatgcattcttta G/C taagcggtctcaatatacac | 2134 | | |
| ABCA4 | 61 | intron6 + 5825 | aaaaagcattttgctcttat A/G aaagcacagcctcttttgag | 2135 | | |
| ABCA4 | 62 | intron6 + 5916 | cccagacaacccaagcagag A/G cctcttagggccggaatcat | 2136 | | |
| ABCA4 | 63 | intron6 + 6993 | agcacaggatcaaggcctaa A/G ggccccttagactgacctca | 2137 | | |
| ABCA4 | 64 | intron6 + 7242 | ttgccattttgatctgtgac T/C tttttttccagaaatagttt | 2138 | | |
| ABCA4 | 65 | intron6 + 7454 | atggagggctccctcgggac T/C aggcagtattcagagatgta | 2139 | | |
| ABCA4 | 66 | intron6 − 264 | aaacagcaattagaatcact T/C tgaaatagtgatagtattta | 2140 | | |
| ABCA4 | 67 | intron6 − 86 | aggagggggggagttttcaa A/G catataggagatcagactgt | 2141 | | |
| ABCA4 | 68 | intron6 − 32 | tatacctacaaacatatata T/C atttaaaaaattgttttact | 2142 | | |
| ABCA4 | 69 | intron7 + 828 | gatgtgggaaagttagagaa G/C agcccattgtactaatgctc | 2143 | | |
| ABCA4 | 70 | intron7 + 1019 | aggcttcttgactgtctaga T/C agcaagtctaatcatttgtg | 2144 | | |
| ABCA4 | 71 | intron8 + 374 | gtaaacacggctgtgggatg C/T ttttacaaacacaatatcgt | 2145 | | |
| ABCA4 | 72 | intron8 + 874 | tgatgagcttgttattggtg G/A ggtacagcctattaatttag | 2146 | | |
| ABCA4 | 73 | intron9 + 605 | tcgtgtctctgtcttgatct C/T tgtctggttttaggccaact | 2147 | | |
| ABCA4 | 74 | intron10 + 1268 | aacttttgaagaactggaac G/A cgttaggaagttggtcaaag | 2148 | | |
| ABCA4 | 75 | intron10 + 1269 | acttttgaagaactggaacg C/T gttaggaagttggtcaaagc | 2149 | | |
| ABCA4 | 76 | intron11 + 5236 | ggcctggcacagatgaaata C/T tattcagagttcacagtgta | 2150 | | |
| ABCA4 | 77 | intron11 + 5270 | cagtgtattttcatttcata A/G tatatttgattttcaggtct | 2151 | | |
| ABCA4 | 78 | intron11 + 5687 | atcatgtaatgtactttaga C/G tcagatatataaatatttgt | 2152 | | |
| ABCA4 | 79 | intron11 + 7136 | gacttcccaacttaccttag T/C ggagctgtagtcacatagaa | 2153 | | |
| ABCA4 | 80 | intron11 + 7180 | acgctcataaatgcttctct G/A ggctgtaaaggttgaatttt | 2154 | | |
| ABCA4 | 81 | intron11 + 7701 | gttagacgcaggcattacct C/T gtggctttgccccagtgtga | 2155 | | |
| ABCA4 | 82 | intron11 + 8073 | gggatgtttgcccacatcca T/C tggcatttctcaaaaggaac | 2156 | | |
| ABCA4 | 83 | intron11 + 8586 | cagctgcctgcgctggagag G/A gctcaaacctcttccgccag | 2157 | | |
| ABCA4 | 84 | intron11 + 8893 | agcaaagatgccctttgact C/T cttttcccactagtggtgct | 2158 | | |
| ABCA4 | 85 | intron11 + 9257 | gaatgaggtcacttgctgca T/A ggcaggtggcttccccatga | 2159 | | |
| ABCA4 | 86 | intron11 + 11234 | cccaaataattttgtttttc G/A ttttaggaattaaatttcag | 2160 | | |
| ABCA4 | 87 | intron11 + 11641 | aagaaacaaacatttattga C/G aacttttggtgtgtgacctg | 2161 | | |
| ABCA4 | 88 | intron11 + 11808 | tggtatttcttaaagaaata C/T caattccatttccttttaac | 2162 | | |
| ABCA4 | 89 | intron11 + 11923 | aagatcattattaatatctc A/G tcagcgtggtgtcacttaag | 2163 | | |
| ABCA4 | 90 | intron11 + 12055 | tgagaacattacatgggacc T/C gcccccagggcatggaggct | 2164 | | |
| ABCA4 | 91 | intron11 + 305 | tcaccctgtggtcgggaggt G/A tgagtgagctatccaagccc | 2165 | | |
| ABCA4 | 92 | intron11 + 1461 | ttgggtttcagtgtcagcat G/A tagctgtctactcagatccc | 2166 | | |
| ABCA4 | 93 | intron12 + 1237 | aagggcaccaaagttctaag A/G gatgaggggaggagctgagc | 2167 | | |
| ABCA4 | 94 | intron13 + 1269 | ggagctgagccccttgtcct T/C atctaggtttcccttgttct | 2168 | | |
| ABCA4 | 95 | intron14 + 1309 | ttcccatccctcagtctgct T/C cttttcccagtaccaacatg | 2169 | | |
| ABCA4 | 96 | intron14 + 2979 | tcacctgtgtgggtagcaaa C/T ctcagaaaatcaagtataga | 2170 | | |
| ABCA4 | 97 | intron14 + 23 | gagtcctttaaaacacaaat C/G ttaatgtttgaaatcaactc | 2171 | | |
| ABCA4 | 98 | intron14 + 204 | tgctgggccctgtgtgatca T/G gaatggctgatcatggatga | 2172 | | |
| ABCA4 | 99 | intron17 + 715 | gggactcccctagagctgaa G/A tactctcccatctgtttgtt | 2173 | | |
| ABCA4 | 100 | intron17 + 1282 | ggaagatgaagaacctaagc C/T gcttccagaaattcatgagg | 2174 | | |
| ABCA4 | 101 | intron17 + 1531 | gtctaccccttaggaccatt G/A taagagtacattgaggtaat | 2175 | | |
| ABCA4 | 102 | intron18 + 1802 | actgctcacccaggaggcaa C/A gcctcgagtcatgcaccgaa | 2176 | | |
| ABCA4 | 103 | intron18 + 195 | acagattattccattgtatg C/A atgaactatgtaagccatcc | 2177 | | |
| ABCA4 | 104 | intron19 + 755 | ctggctgccgctggggtttc C/T tatgtccatccacggggagg | 2178 | | |
| ABCA4 | 105 | intron20 − 497 | ctgagttaggtctagatggg G/A acactttggatgaatgagga | 2179 | | |
| ABCA4 | 106 | intron23 + 702 | tatcaaatacaactcagacg T/G cagtctcctggcccctttga | 2180 | | |
| ABCA4 | 107 | intron26 + 156 | cctgctttccaaacccttat C/T ttgattcttggtaacatgaa | 2181 | | |
| ABCA4 | 108 | intron26 + 385 | tttaaagaacagtgagtcac G/A tgacttgctctttgaaatgc | 2182 | | |
| ABCA4 | 109 | intron27 + 299 | gacatgccatcagaccactg C/T gagtgttcaggcagcctacc | 2183 | | |
| ABCA4 | 110 | intron27 + 168 | ctccttccacacttgtgtgc A/G gggacattcactacctccta | 2184 | | |
| ABCA4 | 111 | intron28 + 497 | gctgtcaataaggaccaaaa C/T agactaatttcaaattcctc | 2185 | | |
| ABCA4 | 112 | intron29 + 587 | agctgctaggaataaaaggg G/A agacaaaacgatccacaagc | 2186 | | |
| ABCA4 | 113 | intron29 + 577 | aataaaaagggagacaaaac G/A atccacaagctagagatggt | 2187 | | |
| ABCA4 | 114 | intron29 + 2494 | aatcacagctcatctgctgc A/G tcctagggatcccaaaagaa | 2188 | | |
| ABCA4 | 115 | intron29 + 2169 | aatgtaacagccaaagtcct A/G gaaaaaggcaagccagttcc | 2189 | | |
| ABCA4 | 116 | intron30 − 535 | ctaactgtgaattatcatct T/G tgatcactgccctttgagat | 2190 | | |
| ABCA4 | 117 | intron30 − 957 | gagttctcagcagcaaatct C/A cagtatgaaattttggattt | 2191 | | |
| ABCA4 | 118 | intron31 + 445 | tccagaggtttagaacctca C/T caagtgggactctaggagcc | 2192 | | |
| ABCA4 | 119 | intron31 + 48 | aggatttttgacttgcttaa C/T taccatgaatgagaaactct | 2193 | | |
| ABCA4 | 120 | intron32 + 129 | tgtttagtcaggcacatatg A/C acatccgactttcaaataag | 2194 | | |
| ABCA4 | 121 | intron33 + 209 | tctccccaacatttatgtgg C/A aagtaagtttacatttggtt | 2195 | | |
| ABCA4 | 122 | intron35 + 3209 | ttgaggcctccacaccccac G/A gcaggttgccccctgaggaa | 2196 | | |
| ABCA4 | 123 | intron35 + 3542 | cttggcagggaggtagggca T/C ggggtggggtaggaggacta | 2197 | | |
| ABCA4 | 124 | intron36 + 304 | ctggggcagccattccccca A/G cccctcacccagctctgact | 2198 | | |
| ABCA4 | 125 | intron36 + 525 | taaatttgaatgagtaatta A/G tccatctcggcctcagtttc | 2199 | | |
| ABCA4 | 126 | intron37 + 766 | tgttgcaggctggagaaccc T/G cctatgaattgtacagggct | 2200 | | |
| ABCA4 | 127 | intron37 + 856 | aaaaccccatgaagtggtca A/G ggcaggcatcattatctcca | 2201 | | |
| ABCA4 | 128 | intron37 + 62 | tagtagagtatgtgttggtc G/A agcagagccaggggcaagca | 2202 | | |
| ABCA4 | 129 | intron37 + 761 | tccttgggcaagttaatctt G/A atgaagagactgggtgttct | 2203 | | |
| ABCA4 | 130 | intron38 + 1315 | cagagtcagactctggaaag G/T cggggggataagaacacagc | 2204 | | |
| ABCA4 | 131 | intron38 + 1316 | agagtcagactctggaaagg C/A ggggggataagaacacagcc | 2205 | | |
| ABCA4 | 132 | intron38 + 1525 | ccaacatttgctaagcaccc G/A ccttcaaaaacctggtattt | 2206 | | |
| ABCA4 | 133 | intron38 + 1561 | gtattttcatgtaaattatc C/A gatacacagctgctatggaa | 2207 | | |
| ABCA4 | 134 | intron38 + 1562 | tattttcatgtaaattatcc G/A atacacagctgctatggaaa | 2208 | | |
| ABCA4 | 135 | intron38 + 1674 | ccagctgaacaccacgtgcc G/A ggtgtgtgctgatataaaca | 2209 | | |
| ABCA4 | 136 | intron38 + 2867 | tgcctggctagacaaagggg A/C agctcccgcccactagaaac | 2210 | | |
| ABCA4 | 137 | intron38 + 2874 | ctagacaaaggggaagctcc C/T gcccactagaaacttgcagg | 2211 | | |
| ABCA4 | 138 | intron38 + 123 | gaggggaccttgttgggctg G/A aggtgtcctgccagctggag | 2212 | | |
| ABCA4 | 139 | intron40 + 1904 | gacactgtacagccagccca A/C tcctgaccccttttcttcat | 2213 | | |
| ABCA4 | 140 | exon41 + 5814 | ggaaataaaactgacatctt A/G aggctacatgaactaaccaa | 2214 | | |
| ABCA4 | 141 | intron41 + 122 | atttggttcccagttttatg T/G agggtcatcatccctgtgtt | 2215 | | |
| ABCA4 | 142 | intron41 + 287 | tctgcagagcatgggtcagc C/T tcgagatgtctcagtactca | 2216 | | |
| ABCA4 | 143 | intron41 + 411 | cctcttcccctccttgctct C/A accctgtctcagttctcagt | 2217 | | |
| ABCA4 | 144 | intron41 + 443 | gttctcagtccggtttcttc G/A tatcttgcagatttatccag | 2218 | | |
| ABCA4 | 145 | exon42 + 5844 | cgtatcttgcagatttatcc A/G ggcacctccagcccagcagt | 2219 | | |
| ABCA4 | 146 | intro43 + 328 | tttgtagcctattcctataa A/G aatgcaccattgcttcccat | 2220 | | |
| ABCA4 | 147 | intron43 + 345 | taaaaatgcaccattgcttc C/G cattacctccctccacacat | 2221 | | |
| ABCA4 | 148 | intron43 + 370 | acctccctccacacattttt A/G caaaacgtttcagggagttt | 2222 | | |
| ABCA4 | 149 | intron43 + 376 | ctccacacatttttacaaaa C/T gtttcagggagtttactgag | 2223 | | |
| ABCA4 | 150 | intron43 + 670 | ttaaacagactggtccccta T/C gggcaggacagagaggatga | 2224 | | |
| ABCA4 | 151 | intron43 + 701 | gagaggatgagctctcactc A/G tctgcctctttcctggctgc | 2225 | | |
| ABCA4 | 152 | intron43 + 822 | gttaggtgctgctgacatct G/A tccagcatctgcttgactgg | 2226 | | |
| ABCA4 | 153 | intron43 + 915 | ggcaggacgagtcctgagca C/T gcttcactggctcagacagg | 2227 | | |
| ABCA4 | 154 | intron43 + 1242 | actgagctggacgctagaaa G/T aaactataggcttaagacac | 2228 | | |
| ABCA4 | 155 | intron43 + 1671 | tagagaagtttacttccatc G/A ggacacatgcatcttttcta | 2229 | | |
| ABCA4 | 156 | intron43 + 2036 | ttgaaggatactcagtaatt G/A ctttttttcttgcagtattt | 2230 | | |
| ABCA4 | 157 | intron45 + 176 | gtgtttggttcacacagctc C/T ggagaaaaacaagtcacggc | 2231 | | |
| ABCA4 | 158 | intron45 + 193 | ctccggagaaaaacaagtca C/T ggcacagccttgacttggga | 2232 | | |
| ABCA4 | 159 | intron47 + 238 | cccaagtctctggatggggc A/G tctgatcaggatgcatgcag | 2233 | | |
| ABCA4 | 160 | intron47 + 269 | atgcatgcagagcctggctg G/A gatgagggagggctgctacc | 2234 | | |
| ABCA4 | 161 | intron47 + 326 | accacttatctcaacagatc C/G gggacctgtggcctatttac | 2235 | | |
| ABCA4 | 162 | intron47 + 715 | aagtcactaagctggttggt G/A ggaggaacagcacataaccc | 2236 | | |
| ABCA4 | 163 | intron47 + 734 | tgggaggaacagcacataac C/T caccttatctatgctgaggt | 2237 | | |
| ABCA4 | 164 | intron47 + 931 | ggacactgcatagatatcta T/C agaaatagcagcatgtcagg | 2238 | | |
| ABCA4 | 165 | intron47 + 1260 | acactctctggtggaccatc A/C ctcatccaagagagggtaac | 2239 | | |
| ABCA4 | 166 | intron48 + 1663 | tctcgctcttctcttacctc T/C aggtgtttgtaaattttgct | 2240 | | |
| ABCA4 | 167 | intron49 + 127 | agagagccccacccacacca C/T ggtccctaccaagtccccac | 2241 | | |
| ABCA4 | 168 | intron49 − 1545 | gcagttaattccaaactttt C/A tcccttattggatgagatca | 2242 | | |
| ABCA4 | 169 | 5′flanking − (1441-1400) | gtaaatctcagttgaatcag (TCA)14-15 atttttcagtctggttcctg | 2243 | | |
| ABCA4 | 170 | intron1 + (4712-4720) | gaggggcggggactataggc (A)8-10 cagcctaattcaaggatgag | 2244 | | |
| ABCA4 | 171 | intron2 + 7295-7304) | ttgttggctttgcaatggat CACAGTCAT/Δ ttattcactc | 2245 | | |
| | | | attcattcac | | | |
| ABCA4 | 172 | intron3 + (951-952) | cctgtccatcagactcttct TT/Δ acctctccccgaggagccca | 2246 | | |
| ABCA4 | 173 | intron4 + (2642-2653) | cctgggtgacagagcgagat (A)10-12 tagcatgagatattattact | 2247 | | |
| ABCA4 | 174 | intron6 + 5202 | cacaaagcatctgacacccc C/Δ agactaggagaaggtctgtc | 2248 | | |
| ABCA4 | 175 | intron6 + (3029-3044) | cactaaaaacaaaaatttac (A)16-18 cttttatggatttacaaaga | 2249 | | |
| ABCA4 | 176 | intron6 + (5138-5139) | ttcatgacagatcagatgtt (G) cttttatggatttacaaaga | 2250 | | |
| ABCA4 | 176 | intron6 + (5138-5139) | ttcatgacagctcagatgtt cttttatggatttacaaaga | 2251 | | |
| ABCA4 | 177 | intron6 + 5985 | tttccttcttcaaacccccc C/Δ agactaggagaaggtctgtc | 2252 | | |
| ABCA4 | 178 | intron6 + 6094 | gggacggacagaaaaagacc T/Δ agtttctgttgagccaaaga | 2253 | | |
| ABCA4 | 179 | intron6 − 161 | tattttttcaattaaataaa A/Δ gagttttttgtttctaaaag | 2254 | | |
| ABCA4 | 180 | intron7 + (809-810) | gggccgagtatgcacactga (TG) tgtgggaaagttagagaaga | 2255 | | |
| ABCA4 | 180 | intron7 + (809-810) | gggccgagtatgcacactga tgtgggaaagttagagaaga | 2256 | | |
| ABCA4 | 181 | intron8 + (472-484) | atcttccccacctttcacta (T)10-13 ggtcttctatggggtaaagg | 2257 | | |
| ABCA4 | 182 | intron9 + (48-71) | gtaccctggacctcccagaa (GT)11-13 gagagagatgtgccttcctg | 2258 | | |
| ABCA4 | 183 | intron9 + 554 | ataggggcagaaaagacaca A/Δ ccaaaagttctctctcactt | 2259 | | |
| ABCA4 | 184 | intron10 + 11 | catgatcagagtaagggggg G/Δ ttggaggatggggaggggcg | 2260 | | |
| ABCA4 | 185 | intron11 + 4242 | ggagaggaaatgatgttagt G/Δ cctcctgtaaataggcccag | 2261 | | |
| ABCA4 | 186 | intron11 + (13743-13753) | tgctcttttgtgggtaatgg (T)9-11 cctcttccaggagaagaaaa | 2262 | | |
| ABCA4 | 187 | intron13 + (636-637) | cggggtggagggttgggagg (G) ctcatttgtcattatagatg | 2263 | | |
| ABCA4 | 187 | intron13 + (636-637) | cggggtggagggttgggagg ctcatttgtcattatagatg | 2264 | | |
| ABCA4 | 188 | intron18 + (569-570) | tgctgccctcatcttctctc TT/Δ aaactagttctgtatttctc | 2265 | | |
| ABCA4 | 189 | intron20 − (304-297) | tataacctgacttttttttc (A)7-9 ggattgcttttttaaacata | 2266 | | |
| ABCA4 | 190 | intron22 + (1236-1246) | gctgaattagttcccttggg (T)9-11 agttaactcctgatttttgc | 2267 | | |
| ABCA4 | 191 | intron26 + (4626-4635) | gataatcaatgctgtaaggg (A)9-10 tggcattagagatccagacc | 2268 | | |
| ABCA4 | 192 | intron33 + (115-116) | taaaaccgtcttgtttgttt GT/Δ ttacatggtttttagggccc | 2269 | | |
| ABCA4 | 193 | intron36 + 1078 | taagcagctatcacttaaca (T) cagccattccccaacccctc | 2270 | | |
| ABCA4 | 194 | intron37 + (290-291) | ccttgaccaaagcctggggg (T) cagccattccccaacccctc | 2271 | | |
| ABCA4 | 194 | intron37 + (290-291) | ccttgaccaaagcctggggg cagccattccccaacccctc | 2272 | | |
| ABCA4 | 195 | intron38 + 986 | ataaaaagaggggggaaaaa A/Δ gaagacagtcgctgcagggc | 2273 | | |
| ABCA4 | 196 | intron38 + (1206-1210) | gtggaccaactgagactgact CT/Δ ttccagatcttgttagggtt | 2274 | | |
| ABCA4 | 197 | intron38 + 1322 | actctggaaaaggcgggggg G/Δ ataagaaaacagccccagca | 2275 | | |
| ABCA4 | 198 | intron38 + 3107 | gggccccatctgctgaagag A/Δ ggggggtggggtttgccccc | 2276 | | |
| ABCA4 | 199 | intron40 + 182 | ttttctccaataatacaagt A/Δ gaggatcgggttaaaatagg | 2277 | | |
| ABCA4 | 200 | intron43 + 330 | tttaattggcacagccatgc A/Δ tgcaccattgcttccgatta | 2278 | | |
| ABCA4 | 201 | intron43 + 1354 | tttaattggcacagccatgc C/Δ tttggtggcttttgtcattg | 2279 | | |
| ABCA4 | 202 | intron47 + (1305-1306) | gatcatgctgaaggagaaag AAAG/Δ caccaatggcccaagcccta | 2280 | | |
| ABCA7 | 1 | 5′flanking − 1588 | agaatgttggccccctccgg C/T tcctgcatggtctgcagaag | 2281 | | |
| ABCA7 | 2 | 5′flanking − 1584 | aatgttgggcccctccccgt C/T ctgcatcctctgcagaagcc | 2282 | | |
| ABCA7 | 3 | 5′flanking − 1180 | ggccagtgagtgacgggcag G/A tcgccaaaatagcagcgtga | 2283 | | |
| ABCA7 | 4 | 5′flanking − 480 | agagctggggtcgtgcctcc A/G gctgggcaactgcctgtctc | 2284 | | |
| ABCA7 | 5 | 5′untranslated − 9 | gtgtgtcacgtcccctgccg A/G gtctcaccatggccttctgg | 2285 | | |
| ABCA7 | 6 | intron5 + 81 | ccccgggccaaggacatccc G/A ttccaggcatccagtctgtc | 2286 | | |
| ABCA7 | 7 | exon6 + 583 | cagcttgttggaggccgctg A/G ggacctggcccaggaggtac | 2287 | | |
| ABCA7 | 8 | intron6 + 183 | gccggagggtcacggaaact A/G tttgaagaagtaggagttag | 2288 | | |
| ABCA7 | 9 | intron8 + 164 | tgtggaggatcagaggcaca C/T gcaggagcaaggcagagggg | 2289 | | |
| ABCA7 | 10 | exon8 + 955 | accggaccttagaggagcta A/G ccctgctgagggatgtccgg | 2290 | | |
| ABCA7 | 11 | intron9 + 421 | tttttttttttttttttttt T/A taagagatggagtctgactc | 2291 | | |
| ABCA7 | 12 | intron9 + 453 | gttgcccaggctggactgca G/A tggcgagatcttggctcact | 2292 | | |
| ABCA7 | 13 | intron9 + 467 | cccaggctggactgcagtgg C/T gagatcttggctcactgcaa | 2293 | | |
| ABCA7 | 14 | intron9 + 488 | gagatcttggctgactgaaa C/T ctccgcctcgtggattcaag | 2294 | | |
| ABCA7 | 15 | exon10 + 1184 | cgcacacgctgatgtgggaa A/G actggtgggcacgctgggcc | 2295 | | |
| ABCA7 | 16 | intron10 + 70 | gagtgacggaggtgagggac T/C gtccacctgcggggtctgtt | 2296 | | |
| ABCA7 | 17 | exon11 + 1306 | cctgggccccggccacgtgc G/A catcaaaatcagcatggaaa | 2297 | | |
| ABCA7 | 18 | intron12 + 118 | cccttcctgctgagcgccgg T/G ttacaaaaatccacgtgacc | 2298 | | |
| ABCA7 | 19 | exon13 + 1824 | accttcctgctgagcgacgc A/C ctgctggttatggtgctcaa | 2299 | | |
| ABCA7 | 20 | intron13 + 56 | ggtgcgctggagggtgacag A/G gaggggcggcaccacgtcgg | 2300 | | |
| ABCA7 | 21 | intron13 + 78 | ggggcggccccacgtgggtg C/A gcgccaccaggccaatccag | 2301 | | |
| ABCA7 | 22 | exon14 + 1851 | cgttgcctctcacagctggg A/G gacatactcccatacagcca | 2302 | | |
| ABCA7 | 23 | exon16 + 2153 | cgagggcgcgcagtggaaca A/C agtgggcacccggactacgg | 2303 | | |
| ABCA7 | 24 | intron16 + 34 | ggcggggctccgggccgggt C/G gcaaatgctttgcgggaggc | 2304 | | |
| ABCA7 | 25 | intron16 + 8 | ctggacccaaagggtgaggc A/C ctacgaggcttaatagctgg | 2305 | | |
| ABCA7 | 26 | intron16 + 161 | tcccgcagcttttataggcc C/T aggcccagcaggtaacggat | 2306 | | |
| ABCA7 | 27 | exon17 + 2386 | caccccatctctgcagtgct G/A gtagaagaggcacgggccgg | 2307 | | |
| ABCA7 | 28 | exon17 + 3427 | accggcctgagtcctggcgt C/A tccgttcgcagcctggagaa | 2308 | | |
| ABCA7 | 29 | intron20 + 168 | cgagacagtaagagttgggg A/G tagacagaggttcccctgga | 2309 | | |
| ABCA7 | 30 | exon21 + 3027 | ctgctgggagaccgtgtggc C/T gtgatggcaggtggccgatt | 2310 | | |
| ABCA7 | 31 | intron22 + 1386 | gggtggggcgtgagccgggg C/T tacctgaagcaaccctttgt | 2311 | | |
| ABCA7 | 32 | exon23 + 3417 | gggatctccgacaacagcct G/G gaggaggtgtgaggcgtggg | 2312 | | |
| ABCA7 | 33 | intron23 + 147 | ggagctctggtgactaagat G/A taactcgggaaggcctgggg | 2313 | | |
| ABCA7 | 34 | intron26 + 3628 | gctggcctagacgtaaccat A/G cggctaaagatgccgcaaca | 2314 | | |
| ABCA7 | 35 | exon29 + 4046 | cccagcctgccagtgtagcc G/A gcccggtgccaggcgcctgc | 2315 | | |
| ABCA7 | 36 | intron30 + 81 | ccccctgggagctataccgg C/A ccccccggctctcagctcac | 2316 | | |
| ABCA7 | 37 | exon31 + 4238 | ctgcctgcatggccccacag A/C tacggaggcttctcgctggg | 2317 | | |
| ABCA7 | 38 | intron32 + 1 | caaggagcagctgtctgagg G/C tgcactgtgagtccctccac | 2318 | | |
| ABCA7 | 39 | intron33 + 54 | ccactgcttgacactgcaat G/A tatggcaccttgtaggcagg | 2319 | | |
| ABCA7 | 40 | intron34 + 245 | cagtactttgggaggccgag G/A caggaggactgattgtggcc | 2320 | | |
| ABCA7 | 41 | exon36 + 3057 | ggtgagcggatcttgaaaaa A/G ggtcttccttatgttccgag | 2321 | | |
| ABCA7 | 42 | intron38 + 66 | ggcccactcacctttgtgca A/G gaactgcaatctcccaggta | 2322 | | |
| ABCA7 | 43 | intron40 + 154 | ctctaactccacacacaaaa C/G caggctctgagacaaacctg | 2323 | | |
| ABCA7 | 44 | intron40 + 277 | ctgagcccccggagccacca T/C aaccagcgtggcccgggaac | 2234 | | |
| ABCA7 | 45 | intron41 + 3392 | gtggcccgggaacccagtgc T/C gagcacctgagcatgggata | 2325 | | |
| ABCA7 | 46 | intron41 + 286 | ctccttgactctgagttctg T/C ggccgtgcacacttgctcat | 2326 | | |
| ABCA7 | 47 | intron41 + 396 | tggcagttcccagtttgcag C/T cgtttcactgcctcttcaat | 2327 | | |
| ABCA7 | 48 | intron41 + 391 | cacactatggccctgcccca C/T accatcccagctccacccaa | 2328 | | |
| ABCA7 | 49 | intron41 + 394 | actatggccctgccgcagac C/T catcccagctggacacacaa | 2329 | | |
| ABCA7 | 50 | intron41 + 398 | tggccctgccccacacccat C/G acagctcgacccacaccatg | 2330 | | |
| ABCA7 | 51 | intron41 + 1001 | ccctgccccacacccatagc A/G gctccacccacaccatgggg | 2331 | | |
| ABCA7 | 52 | intron41 + 1051 | actcatgctggctccaccca C/T accatggccccgccccatac | 2332 | | |
| ABCA7 | 53 | intron41 + 1131 | tgccctgccccatgcccatt A/G tgcccctgctccacactcaa | 2333 | | |
| ABCA7 | 54 | exon44 + 5985 | gaagcgctctgctcgcgcct G/A gccatcatggtgaatgggcg | 2334 | | |
| ABCA7 | 55 | intron44 + 201 | ggcgcaggaccaggaggcgt G/C agccgggggctctgggtgga | 2335 | | |
| ABCA7 | 56 | intron44 + 233 | ctgggtggatttagaagaca C/T aatcaggtgtgcgttggagt | 2336 | | |
| ABCA7 | 57 | intron44 + 313 | agttaggggagggcctggtt A/G gtgggcggggccataggaaa | 2337 | | |
| ABCA7 | 58 | intron44 + 337 | ggcggggccataggaaagtg G/T cggagctgcgcgaggcacat | 2338 | | |
| ABCA7 | 59 | exon45 + 6133 | tggcggccgagttccctggg G/T cggagctgcgcgaggcacat | 2339 | | |
| ABCA7 | 60 | exon45 + 6159 | ctgcgcgaggcacatggagg C/T cgcctgcgcttccagctgcc | 2340 | | |
| ABCA7 | 61 | intron45 + 27 | acggcgccggggtcgggctg G/C gggaggcaggctgggggcca | 2341 | | |
| ABCA7 | 62 | 3′untranslated + 6580 | aaggctggagagaagccgtg G/C tggtgaaaccgtgtgcatgt | 2342 | | |
| ABCA7 | 63 | 3′flanking + 108 | caagctgagtgtgcacatac G/A ggccaagtggcgattcatag | 2343 | | |
| ABCA7 | 64 | 3′flanking + 376 | cttacaggagcccggtgtcc C/T ggagcacaggccagggccgg | 2344 | | |
| ABCA7 | 65 | 3′flanking + 687 | cagcagggagacttggggag G/A ggggagagagttcacactgc | 2345 | | |
| ABCA7 | 66 | 3′flanking + 688 | agcagggagacttggggagg G/A gggagagagttcacactgcg | 2346 | | |
| ABCA7 | 67 | 3′flanking + 1169 | cctcgacctgacccacttca C/T ggggctgcagggcgggtgat | 2347 | | |
| ABCA7 | 68 | intron9 + (398-422) | tgtgaactaccacgtcctgc (T)22-26 aagagatggagtctcactct | 2348 | | |
| ABCA7 | 69 | intro121 + (175-184) | ggggactctgagggtctggt (G)8-10 actctgagggtctgggggcc | 2349 | | |
| ABCA7 | 70 | intron30 + (81-87) | ccccctgggagctctcccgg (C)6-7 ggccctcagctccccttccc | 2350 | | |
| ABCA7 | 71 | intron34 + (349-361) | agaaagagaaagagagaaag (A)12-14 cagaaatgtgctttgggtga | 2351 | | |
| ABCG1 | 1 | 5′flanking − 1772 | cctgggcttcagcaggggcc T/C cacacctgcaatgggtgcct | 2352 | | |
| ABCG1 | 2 | 5′flanking − 1754 | cctcacacctgcaatgggtg C/T ctggggagagggtgcagatg | 2353 | | |
| ABCG1 | 3 | 5′flanking − 1450 | tccaaagcccagatttggtg T/C ttttggggctcttttggaat | 2354 | | |
| ABCG1 | 4 | intron1 + 4 | ctggtggaggaagaaaggta G/A ggagggcggctgctttgtgt | 2355 | | |
| ABCG1 | 5 | intron1 + 576 | agctcaggaggtgtctggaa C/T gccacacagtgcaggagttt | 2356 | | |
| ABCG1 | 6 | intron1 + 1426 | aattctccttctaaacttaa A/G gaaatattttatagaaaaat | 2357 | | |
| ABCG1 | 7 | intron1 + 2342 | agagcctgcaatgggccgcc G/A agggacctgcccatgactca | 2358 | | |
| ABCG1 | 8 | intron1 + 2399 | gaggggttgacagacaggat A/G tgtctgctgtgttccagctg | 2359 | | |
| ABCG1 | 9 | intron1 + 2406 | tgacagacaggatatgtctg C/G tgtgttccagctgctggttt | 2360 | | |
| ABCG1 | 10 | intron1 + 2911 | ccctctctgtgcccactgtt G/C tcccaacaccagcctgttct | 2361 | | |
| ABCG1 | 11 | intron1 + 4363 | tataatagattcctagcaga A/G aacataattgtgagaggaac | 2362 | | |
| ABCG1 | 12 | intron1 + 4752 | gctttcagagcccattcaca C/T aagggtctcattttattagg | 2363 | | |
| ABCG1 | 13 | intron1 + 5026 | ccaggtctgtgggatttcag G/A ccaaaaaggagcgtagcaag | 2364 | | |
| ABCG1 | 14 | intron1 + 5532 | gggttaaatattccgggcag C/T gccaagtcagattatctgta | 2365 | | |
| ABCG1 | 15 | intron1 + 5681 | gctaaagtgcatggaaggca T/C catgaataaatcctttcagg | 2366 | | |
| ABCG1 | 16 | intron1 + 6290 | tcacagcagattcatgagag T/A tgaatgtttagccgccatgt | 2367 | | |
| ABCG1 | 17 | intron1 + 6386 | agatgctcccctccagccag C/T acattttctccctgtgagca | 2368 | | |
| ABCG1 | 18 | intron1 + 6758 | acctgcatggtgggtgcccc C/G ctgccttcctctactgcctt | 2369 | | |
| ABCG1 | 19 | intron1 + 7029 | tgggtcagattaaatatatc C/T tgaaggactaaaccgtaaaa | 2370 | | |
| ABCG1 | 20 | intron1 + 7176 | ttgctcacattgtgaaaaaa C/G gcaaaaagatgggttttcag | 2371 | | |
| ABCG1 | 21 | intron1 + 8243 | gcctgagagcgctggcagta G/A gaagggtcgccagtgtggac | 2372 | | |
| ABCG1 | 22 | intron1 + 11224 | tctggtttagagaggaaaat G/A ggcagcatcattttgtcacc | 2373 | | |
| ABCG1 | 23 | intron1 + 11371 | gggctctcttggagcccttt T/G tctctcccagccctgcgtct | 2374 | | |
| ABCG1 | 24 | intron1 + 12420 | gagttgtcctccaagagaat C/T tttgtatggttccttttctg | 2375 | | |
| ABCG1 | 25 | intron1 + 12484 | gagttgtcctccaagagaat G/T tttgtatggttccttttctg | 2376 | | |
| ABCG1 | 26 | intron1 + 12955 | ctggggttggtgggagccac A/G gtctcacacctattggcagg | 2377 | | |
| ABCG1 | 27 | intron1 + 12985 | ctcttggcaggtcgtgaaca T/C tgttcttggatttgcaaata | 2378 | | |
| ABCG1 | 28 | intron1 + 20041 | acatggccggcttcccttct T/C cctcggaatggcctggaatt | 2379 | | |
| ABCG1 | 29 | intron1 + 20046 | gccggcttcccttcttcctc G/A gaatggcctggaattcgatc | 2380 | | |
| ABCG1 | 30 | intron1 + 21058 | acaagacttagaatttgacc G/A tgattttaaaactattctaa | 2381 | | |
| ABCG1 | 31 | intron1 + 26189 | ttcttggatgtggccatgca C/T gggggcaagggtttgatgag | 2382 | | |
| ABCG1 | 32 | intron1 + 27453 | atcatgtggtttgggggaaa G/C ctgggaccccacttggtaca | 2383 | | |
| ABCG1 | 33 | intron1 + 28098 | caggaaggagacagctgctg G/C tgctgcttagagttaggcgc | 2384 | | |
| ABCG1 | 34 | intron1 + 29670 | ccttcagttgtaataggcag A/G aggagcgcacgaggaggctg | 2385 | | |
| ABCG1 | 35 | intron1 + 29810 | attgtttctcctggttttgt T/C tgtgttgactttccctttaa | 2386 | | |
| ABCG1 | 36 | intron1 + 36220 | cagatcccttggttgctggg C/T aggtagtaggagaggttttt | 2387 | | |
| ABCG1 | 37 | intron1 + 36341 | aaacagggcttgagtcctcc G/A taagggacaggagaccttcc | 2388 | | |
| ABCG1 | 38 | intron1 + 36370 | aggagaccttcccacatcct G/A gcaagaattcttcttttttc | 2389 | | |
| ABCG1 | 39 | intron1 + 36662 | cagactaaatgcacaattct G/A gattgagctgactgtattga | 2390 | | |
| ABCG1 | 40 | intron1 + 36914 | tgtaaaagatggagaagaac A/G cagtagtcgcttgctgtgag | 2391 | | |
| ABCG1 | 41 | intron1 + 37029 | tgtgactcatggcctctgcc A/G ggggactgggctggccctgc | 2392 | 2392 | |
| ABCG1 | 42 | intron4 + 1196 | tgaaaagaaaatggatgagt G/A gaaaccaaaagagagaaaat | 2393 | | |
| ABCG1 | 43 | intron4 + 1200 | aagaaaatggatgagtggaa A/C ccaaaagagagaaaatgtgg | 2394 | | |
| ABCG1 | 44 | intron4 + 2041 | aagcagaggcttttccaccc G/A gagactcaagaagctgctcc | 2395 | | |
| ABCG1 | 45 | intron4 + 2490 | gtggtgaagtagagctgagc A/T cacgggggagccctccatcc | 2396 | | |
| ABCG1 | 46 | intron4 + 2552 | atggccttgggccactgcct G/A ctgtgccccgagccgagctt | 2397 | | |
| ABCG1 | 47 | intron4 + 2822 | cagcaggctccgtgctgaag T/C cacagcaagccaggcccttg | 2398 | | |
| ABCG1 | 48 | intron4 + 2850 | agccaggcccttggcctgcc G/A gagctggaagacccagaaca | 2399 | | |
| ABCG1 | 49 | intron4 + 2919 | gcctcccaggagtagctaca C/T gggacccgaaggcagatggc | 2400 | | |
| ABCG1 | 50 | intron4 + 3506 | ggcagcctgggctgccgaga T/C cacagcaagccaggcccttg | 2401 | | |
| ABCG1 | 51 | intron4 + 3538 | cgcccgccgggaagccccag G/A ggggctggagctacaagtgg | 2402 | | |
| ABCG1 | 52 | intron4 + 3554 | ccaggggggctggagctaca A/G gtggccttgcaggttttttg | 2403 | | |
| ABCG1 | 53 | intron4 + 3721 | ccagctcatgggcaggggtg C/T ggagggaaaggcacccacag | 2404 | | |
| ABCG1 | 54 | intron4 + 3852 | caccagagccactcagtcgg C/T caagagcgtcgcccagtggt | 2405 | | |
| ABCG1 | 55 | intron4 + 3921 | gaagaccagcagtcgatgcc A/G gctgggaagagggctctgcc | 2406 | | |
| ABCG1 | 56 | intron4 + 3979 | acccaccagccttttccaga C/T agccttccagaagctgtttc | 2407 | | |
| ABCG1 | 57 | intron4 + 4291 | gagccgctggagtagggtcc G/A cttgctatggctcccagggg | 2408 | | |
| ABCG1 | 58 | intron4 + 4922 | gaaaccaccagaaattgtgc A/G tcctctcatgtgtccattca | 2409 | | |
| ABCG1 | 59 | intron4 + 4968 | tattgactggacaccttctc C/T gtatggggcactgggctagg | 2410 | | |
| ABCG1 | 60 | intron7 + 672 | atcagtaacgggtcactaac G/A gatgctgctgagtggggcag | 2411 | | |
| ABCG1 | 61 | intron7 + 840 | atttcatttcctcaatgtcg T/C ctgaccagagagcgggaggt | 2412 | | |
| ABCG1 | 62 | intron7 + 891 | tggcccactgttgagggtgt G/A ggtgaccagaggggcctgga | 2413 | | |
| ABCG1 | 63 | intron7 + 997 | tgtgtcctggtttgtggctt C/G atctaggaggtgtggtggcc | 2414 | | |
| ABCG1 | 64 | intron9 + 1616 | ctggaggagaagacaggata A/C agtctaagacgtgctgtcac | 2415 | | |
| ABCG1 | 65 | intron9 + 1630 | aggataaagtctaagacgtg C/T tgtcacagagttcagggtcc | 2416 | | |
| ABCG1 | 66 | intron9 + 1674 | gcttccaaaggccgcatccg G/T gttgttctctgagccgagga | 2417 | | |
| ABCG1 | 67 | intron9 + 1689 | gcttccaaaggccgcatccg C/T gaggacggctttgcgaacgc | 2418 | | |
| ABCG1 | 68 | intron10 + 446 | tggctgacagtgaacacagc G/A gctgcttctccagaacttta | 2419 | | |
| ABCG1 | 69 | intron10 + 581 | atgcagagtttcagaagagg C/G agactcaggaagagtaaggc | 2420 | | |
| ABCG1 | 70 | intron13 + 243 | acccggagagccatggcagg A/C ccaagtgttctggacgttgc | 2421 | | |
| ABCG1 | 71 | 3′untranslated + 2370 | gcctctcagctgatggctgc A/G cagtcagatgtctggtggca | 2422 | | |
| ABCG1 | 72 | 3′flanking + 1124 | ctcagaactacatcgagtga G/A gtcagtgttgaaaacgccca | 2423 | | |
| ABCG1 | 73 | 3′flanking + 1252 | atggggcccacagccctgcc T/C cagaagcagctttggtctcg | 2424 | | |
| ABCG1 | 74 | 3′flanking + 1433 | gggggaagagcttgggaacc A/G tgagggctgttaggctgcaa | 2425 | | |
| ABCG1 | 75 | 3′flanking + 1513 | tgaagggtgaactggagtag G/C tgaggattctgcagttgacg | 2426 | | |
| ABCG1 | 76 | intron1 + (19909-19944) | ccgatgaggaggggatgggg (CACCAGGCAGCAGACTCTGA | 2427 | | |
| | | | TGAGGAGGGGAGGGGG)caccaggcagcagactctga | | | |
| ABCG1 | 77 | intron1 + (19909-19944) | ccgatgaggagggggatgggg ca | 2428 | | |
| | | | ccaggcaagcagactctga | | | |
| ABCG1 | 78 | intron1 + (25136-25137) | catgaacttgcctgaccata (G) ccctgtgaggagctagggct | 2429 | | |
| ABCG1 | 79 | intron1 + (25136-25137) | catgaacttgcctgaccata ccctgtgaggagctagggct | 2430 | | |
| ABCG2 | 1 | intron1 + 152 | tcatttgaaagtgggtatgc G/A gtttaaaactgacagttcaa | 2431 | | |
| ABCG2 | 2 | intron1 + 614 | agctagtcataaataaatac G/A ccagagtagtaaggaagaga | 2432 | | |
| ABCG2 | 3 | intron1 + 10002 | cctcatgaatggtatacatg T/A cccaacatatctctttcgat | 2433 | | |
| ABCG2 | 4 | intron1 + 10123 | acagtggtccctttgggtgc G/A tatacccaaatccctgcata | 2434 | | |
| ABCG2 | 5 | intron1 + 10768 | ataggaataattgagaacag G/A gtctgaagaactctgcagga | 2435 | | |
| ABCG2 | 6 | intron1 + 10791 | ctgaagaactctgcaggaaa T/C gaaaatagttccctgctttt | 2436 | | |
| ABCG2 | 7 | intron1 + 10792 | tgaagaactctgcaggaaat G/A aaaatagttccctgatttta | 2437 | | |
| ABCG2 | 8 | intron1 + 14183 | tcacttaaggctttgcaggg T/G gtctaggacacagaaagaga | 2438 | | |
| ABCG2 | 9 | intron1 + 14934 | aaagtgtctttaaaatttcc A/G tcttgagtcagtgagctatt | 2439 | | |
| ABCG2 | 10 | intron1 + 14955 | tcttgagtcagtgagctatt G/T aaattcaagcaataagttat | 2440 | | |
| ABCG2 | 11 | intron1 + 17251 | ctgtttgggaacagcaactc A/C atcataggcagagagaaagt | 2441 | | |
| ABCG2 | 12 | intron1 + 17347 | atttcaaacctgtttcacaa G/A ttgttaagctcatcttaagg | 2442 | | |
| ABCG2 | 13 | intron1 + 17626 | gaaggtgcataacaacttcc T/G acataaagtctggagctata | 2443 | | |
| ABCG2 | 14 | intron1 + 18271 | aaatgaagctgctcattgcc A/G cacatttaaaaatggacttg | 2444 | | |
| ABCG2 | 15 | intron1 + 18369 | ctattgcttttctgtctgca G/T aaagataaaaactctccaga | 2445 | | |
| ABCG2 | 16 | exon2 + 34 | atgtcgaagtttttatccca G/A tgtcacaaggaaacaccaat | 2446 | | |
| ABCG2 | 17 | intron2 + 36 | tgtaaaaagacagcttttta A/G tttacctacagtgaacctca | 2447 | | |
| ABCG2 | 18 | intron2 + 4230 | caaccctaaattggagggcc C/T gggcgtggtgattgagaaag | 2448 | | |
| ABCG2 | 19 | intron2 + 4518 | gttgacagacttttatagtg A/C gggacactgacctgcatgca | 2449 | | |
| ABCG2 | 20 | intron2 + 6278 | atgtatgtaccacgtcttca T/C attcttaaaggatgacccta | 2450 | | |
| ABCG2 | 21 | intron3 + 10 | ggcaaatcttcgtgagtata A/G gagagtataagtaagcgttt | 2451 | | |
| ABCG2 | 22 | intron5 + 421 | tgccggtgagagaaaactta C/A agttctcagcagctcttcgg | 2452 | | |
| ABCG2 | 23 | intron6 + 3158 | actattctagttgattctag A/G ttgtcaatacaacacactga | 2453 | | |
| ABCG2 | 24 | intron6 + 3203 | tcctattctgttttaataaa A/G gcattgaatttaggtttgct | 2454 | | |
| ABCG2 | 25 | intron6 + 3287 | gtcaggctgaactagagcaa A/G caatctaaaggcaagaatag | 2455 | | |
| ABCG2 | 26 | intron1 + 179 | ttcatttttgtagcaccagc T/C tgttatttaggtatctttct | 2456 | | |
| ABCG2 | 27 | intron8 + 5677 | gcacttggactttgctttgc T/C acatacttgcattgctctgc | 2457 | | |
| ABCG2 | 28 | intron8 + 5974 | tatactaataaatggtgtgt A/T taagtttttatctctaattg | 2458 | | |
| ABCG2 | 29 | intron10 + 1908 | gacgcttatgtgcagcctat G/T ttgatgtctggaaaggctga | 2459 | | |
| ABCG2 | 30 | intron10 + 2094 | ccctgagggctgaggtatct G/A gattatttccagacttgcta | 2460 | | |
| ABCG2 | 31 | intron11 + 20 | tgtgagtaggtctttgttct A/G ggaacggggctgtccagcag | 2461 | | |
| ABCG2 | 32 | intron11 + 1447 | tgttcttcaaggaaagcccc C/T gtcaaagaaggaaaagaagc | 2462 | | |
| ABCG2 | 33 | intron12 + 49 | atgtctttagtcttgcctat G/T ggtgaagtcagttgcacctt | 2463 | | |
| ABCG2 | 34 | intron12 + 1566 | tatgcagttacatggacaga C/T acaacattggagaccgaggg | 2464 | | |
| ABCG2 | 35 | intron13 + 40 | gctctgataaggaattgttt C/T tttccttcatttcttcctgc | 2465 | | |
| ABCG2 | 36 | intron13 + 1823 | ttactcaagcaggcctgact C/T ttagtatttgctttttgtag | 2466 | | |
| ABCG2 | 37 | intron14 + 497 | ctaatgaaaacaaacaagaa T/C gaaagattgtcactgtaaat | 2467 | | |
| ABCG2 | 38 | intron14 + 815 | taactctttggaaacttctt A/G aaatttaaaactgtttacct | 2468 | | |
| ABCG2 | 39 | intron15 + 110 | ccaggggcactgaatttttc C/T gagcctacgttttctcatcc | 2469 | | |
| ABCG2 | 40 | intron15 + 566 | gccgcatagtcatgtgttgt T/A gtttttaaattaacttggaa | 2470 | | |
| ABCG2 | 41 | intron15 + 639 | aacaagaaacacttgaataa G/A ttgagaaaaaaccccgtttt | 2471 | | |
| ABCG2 | 42 | intron15 + 1197 | tgagtagctgggattacagg C/T gcccaccaccacacctggct | 2472 | | |
| ABCG2 | 43 | intron16 + 520 | catcaattcaggtcaagaaa T/C agaagattgtagcacacaaa | 2473 | | |
| ABCG2 | 44 | 5′flanking − (996-995) | gttgggatggctacactcac TCAC/Δ aaagcctgatggcccgtttc | 2474 | | |
| ABCG2 | 45 | intron13 + 405 | ctgctagtttattttttttt T/Δ aacatttttaatttatgttt | 2475 | | |
| ABCG2 | 46 | intron13 + (692-702) | tcaatatgtttctgcttatc (T)9-11 aatggttacttaatcctaat | 2476 | | |
| ABCG2 | 47 | intron15 + (645-650) | aaacacttgaataagttgag (A)7-8 ccccgttttcacataatgtt | 2477 | | |
| ABCG4 | 1 | intron1 + 84 | ggcctgggtgtcccatgttc G/A gaaagtcctgcaccagtggg | 2478 | | |
| ABCG4 | 2 | intron2 + 77 | gaacacagaaggtattctga A/G agggcattgacccccatcct | 2479 | | |
| ABCG4 | 3 | intron6 + 679 | tggtgtccctcatgaagtcc C/T tggcacaggggggccgtacc | 2480 | | |
| ABCG4 | 4 | intron7 + 95 | ggcctcctaggggtagagat C/T tcaccgtcgcctgccttccc | 2481 | | |
| ABCG4 | 5 | intron8 + 158 | cttgcccttgggaagtgagt G/A tgaatctaaactgagctctc | 2482 | | |
| ABCG4 | 6 | intron9 + 106 | ccccagaggcattgcaacca A/G tgggtgctaggaagaaccta | 2483 | | |
| ABCG4 | 7 | intron9 + 1089 | aggtacacaacttaatggta C/G aagattctctgtagacctgg | 2484 | | |
| ABCG4 | 8 | intron11 + 1113 | acgtgagacgagataagtga T/C ggtcatatggccagggagga | 2485 | | |
| ABCG4 | 9 | intron11 + 1120 | acgagataagtgatggtcat A/G tggccagggaggaaggggac | 2486 | | |
| ABCG4 | 10 | intron11 + 1173 | gggggacagcttgaacaaga A/G tgtggaggcaggatggacac | 2487 | | |
| ABCG4 | 11 | 3′untranslated + 2758 | gagtgacaggcacatacatg A/C gaacaggccatctcagccct | 2488 | | |
| ABCE1 | 1 | 5′flanking − 158 | aactcagattctcggcacct C/T cagcagctggcttcgccaac | 2489 | | |
| ABCE1 | 2 | intron9 + 237 | ctgaaattatatgcaaattc C/T gtagctttataggaagcaga | 2490 | | |
| ABCE1 | 3 | intron9 + 4203 | ttgtgtaggaagctgataca T/G taatttgacatatgagatgt | 2491 | | |
| ABCE1 | 4 | intron10 + 1811 | ccaagaaacttcagctttct C/T ttcacttaaatataggaaac | 2492 | | |
| ABCE1 | 5 | intron17 + 2301 | atatccagaaacagatggta T/C gtgcagaacaggttgtacag | 2493 | | |
| ABCE1 | 6 | 3′untranslated + 2758 | tggatgattagactgactct G/C agaatattgataagccattt | 2494 | | |
| ABCE1 | 7 | intron1 + (5349-5363) | tttgtctgggttggttgggg (T)13-16 gagactgggtctgactctca | 2495 | | |
| ABCE1 | 8 | intron1 + (5845-5845) | tacatttgtcaaaatttata (T)9-10 gcagataatcatttcatctc | 2496 | | |
| ABCE1 | 9 | intron5 + (836-851) | taaattcacatgattctgta (T)14-16 aggatcctcctgactggcag | 2497 | | |
| ABCE1 | 10 | intron8 + (1153-1169) | tctttcaaacttatatttgc (T)13-17 catagtttcatgtttgatga | 2498 | | |
| ABCE1 | 11 | intron9 + (1023-1024) | ttgctctgtttcaaatctct (T) attcatgggccagcagctcg | 2499 | | |
| ABCE1 | 11 | intron9 + (1023-1024) | ttgctctgtttcaaatctct attcatgggccagcagctcg | 2500 | | |
| ABCE1 | 12 | intron9 + (2338-2348) | agtgtagatggacctcgggg (A)6-9 ctagttaaggaaaagtaata | 2501 | | |
| ABCE1 | 13 | intron9 + (3213-3221) | ttccaattttccattgttac (T)8-9 cttgccagattactcctgaa | 2502 | | |
| ABCE1 | 14 | intron10 + (284-299) | tcctctgcattttggcttct GCAGTATTACTGTAGT/Δ atttg | 2503 | | |
| | | | tcattttcaaattaa | | | |
| ABCE1 | 15 | intron10 + (840-853) | ttttttggtttctttctttc (T)13-14 aatcttggaggaatcttttt | 2504 | | |
| ABCE1 | 16 | intron16 + (1163-1172) | gattagaaatccaggttaaa (T)9-10 gttttgcacaaaaatattac | 2505 | | |
| ABCE1 | 17 | intron16 + (1372-1382) | taaaatttaatcaaaattga (T)10-11 ctcttagtcctcaaaccctt | 2506 | | |
| CHST1 | 1 | intron1 + 2475 | taaatggagaaaataacacc G/A acctgatagcattgttgtga | 2507 | | |
| CHST1 | 2 | intron1 + 2612 | aaactccccaagcatgctca C/A ctagatccttaccctaggtc | 2508 | | |
| CHST1 | 3 | intron1 + 3900 | gccctgcccccactcccaga C/G ttgcggccctccagcccctt | 2509 | | |
| CHST1 | 4 | intron1 + 6520 | cctcccccagaggagctggg C/T acactggggccttgtgttgt | 2510 | | |
| CHST1 | 5 | intron1 + 7534 | attgtgtgttggcatactgc T/C cacatggaaggatgctctag | 2511 | | |
| CHST1 | 6 | intron1 + 7911 | ttttccttaggaagaaaaac G/A ccttgctgttttatgcattt | 2512 | | |
| CHST1 | 7 | intron1 + 7963 | aaaacattcatgggggatta G/C tgctggctacgtcagagtca | 2513 | | |
| CHST1 | 8 | intron1 + 8173 | gcgctgccacagatcaggcc G/A aggtgggggacagaaatgcc | 2514 | | |
| CHST1 | 9 | intron1 + 9701 | cccagaattctgaatacagc A/G gcgatgacgggactacgagg | 2515 | | |
| CHST1 | 10 | intron1 + 12132 | aacagatccacaggaccaga C/A agcaaaggggaggaacatgc | 2516 | | |
| CHST1 | 11 | intron1 + 12465 | atgcagggaaggggcttggc G/A caaaactgtcaactgagata | 2517 | | |
| CHST1 | 12 | intron1 + 12561 | atgctccctggtccactttc G/A ctttgagtttcaggtagctg | 2518 | | |
| CHST1 | 13 | intron3 + 529 | ccatggtctgcaggggtcct T/G catgctcaggggattggggt | 2519 | | |
| CHST1 | 14 | intron3 + 617 | agaggacagaggaaagagga C/A cacctggagaactgggcgcc | 2520 | | |
| CHST1 | 15 | intron3 + 796 | aagaggcttccgcagctgtc C/T gcaggttaaatcctggggtg | 2521 | | |
| CHST1 | 16 | intron3 + 818 | caggttaaatcctggggtgc A/G aggaatgtttgttcagctcc | 2522 | | |
| CHST1 | 17 | 3′flanking + 762 | ataactggtacaggtttact G/C gtgtctacactggcagagaa | 2523 | | |
| CHST1 | 18 | intron1 + 7874 | gttttccccttgccttgcct T/Δ cattttcatcacctcatttt | 2524 | | |
| CHST1 | 19 | 3′flanking + (335-349) | cacactgccacacctggcta (T)12-15 ggattttagtagagacgggg | 2525 | | |
| CHST3 | 1 | 5′untranslated − 294 | tccagcgtgccgaccggccc C/G gcagcgcctccatccctccg | 2526 | | |
| CHST3 | 2 | intron1 + 96 | gcgtccaggcgcgcgcgcca G/A actttggagggagaaggggg | 2527 | | |
| CHST3 | 3 | intron1 + 4467 | agagaagaatggggcagagc C/G ggagcagccaggggaggtga | 2528 | | |
| CHST3 | 4 | intron1 + 4853 | ggatgagcactgcccagctg A/G tccctgcccaccttccacag | 2529 | | |
| CHST3 | 5 | intron1 + 4965 | tccactgcagaggggacaca G/C tgaccaggacggaagttggg | 2530 | | |
| CHST3 | 6 | intron1 + 5046 | gggctgtccatctttgtacc C/T ctggttccatcccagtgcct | 2531 | | |
| CHST3 | 7 | intron1 + 5300 | ccttttcttctctaaggcct A/G aagagatgacagaatgctgc | 2532 | | |
| CHST3 | 8 | intron1 + 5354 | agcgcgtggactccacagcg G/A ggtgtggggtggcccctggc | 2533 | | |
| CHST3 | 9 | intron1 + 5428 | gacacgcttcagccctctgt C/G tctattgccccaaatctggc | 2534 | | |
| CHST3 | 10 | intron1 + 5621 | ctgtggcttccctgggccct A/G ggaaatttatcactgaggtt | 2535 | | |
| CHST3 | 11 | intron1 + 6555 | gagtggggcactgctggaag G/C ttctggttcctgctttgttc | 2536 | | |
| CHST3 | 12 | intron1 + 6990 | aaacacactgggccaccccc G/A tccccgcactgtgactacac | 2537 | | |
| CHST3 | 13 | intron1 + 7133 | ctgagggcctgtcctgcagg T/G ttgatgtgtctgaagaggcc | 2538 | | |
| CHST3 | 14 | intron1 + 7161 | gtctgaagaggccccgagaa T/C agaaatctagaacctgccag | 2539 | | |
| CHST3 | 15 | intron1 + 7199 | cagtcacgaagcagtgtcac C/T caccagaggatgaagaactg | 2540 | | |
| CHST3 | 16 | intron1 + 7316 | cttgcatctggtgtaggtgc C/T tgggggtagcgtgcccagga | 2541 | | |
| CHST3 | 17 | intron1 + 7967 | gacaggaaccccaccccgag T/G gatgtctggccctgtgacct | 2542 | | |
| CHST3 | 18 | intron1 + 11412 | gcttgcacttctgattcatt C/T tgcagtcactggctctttgt | 2543 | | |
| CHST3 | 19 | intron1 + 11591 | ccctggaagggcctcactgc G/A gtgactcattacccagcatg | 2544 | | |
| CHST3 | 20 | intron1 + 12541 | acccacacagcatgaatggg G/C ccagccccagcctgcccgct | 2545 | | |
| CHST3 | 21 | intron1 + 12672 | gtagccacagctggggctgt G/C gggtcagggcatggcaaggg | 2546 | | |
| CHST3 | 22 | intron1 + 14809 | ggatgtgtagggtttgggct C/T ggccttaagggatgggtgga | 2547 | | |
| CHST3 | 23 | intron1 + 16161 | gatgctggtcaggcattgtc G/A ttgggatctttaacaccacc | 2548 | | |
| CHST3 | 24 | intron1 + 16385 | tatttagcatgtgggtttca A/C ctttctgttttttcaaaggg | 2549 | | |
| CHST3 | 25 | intron1 + 33638 | gacttgggccacgtccttgg G/C catgaatcttggtctatgtc | 2550 | | |
| CHST3 | 26 | intron1 + 33878 | agcaagaaagtgtgctcccc C/T acagccccactcaggcataa | 2551 | | |
| CHST3 | 27 | intron1 + 34690 | agcacacatggagctttccc G/A cagtgggtttcagcgctccc | 2552 | | |
| CHST3 | 28 | intron1 + 35145 | agggaagccgaagcctcact T/C gctggggcttgcctggcctc | 2553 | | |
| CHST3 | 29 | intron1 + 35340 | tgtgaagttttgcccacagt T/C ggtggccatggttcgcaccg | 2554 | | |
| CHST3 | 30 | intron1 + 35436 | gccactcatgtatggagcaa T/C tgcctttttttcttcctctt | 2555 | | |
| CHST3 | 31 | intron1 + 36150 | ccatagaagaggctgggcct G/T aggaagccagggaagcagga | 2556 | | |
| CHST3 | 32 | intron1 + 36194 | ggtgtggggaggccagcagg G/A gtgtgggcctcagcggggag | 2557 | | |
| CHST3 | 33 | intron1 + 36581 | ctctggtgtttgctgtcaat A/G tgcagagtgctggacaaaac | 2558 | | |
| CHST3 | 34 | intron1 + 37602 | ctggaacagcaacttaaaaa A/T agaaatagtccctggaaggg | 2559 | | |
| CHST3 | 35 | intron1 + 37725 | gggtagccagggcagctccc C/T gacccgcacctgcctttt | 2560 | | |
| CHST3 | 36 | intron1 + 37734 | gcagctccccgacccgca C/G ctgccttttcacccctctcc | 2561 | | |
| CHST3 | 37 | intron1 + 38208 | gccattctagatgcgagtcc C/T gactttggggtgcttgca | 2562 | | |
| CHST3 | 38 | intron1 + 38219 | cgagtcccgactttgggg T/C gcttgcattctgggaaggga | 2563 | | |
| CHST3 | 39 | intron2 + 255 | ctacagctgtgaaaggttag A/G caagatacttaacatttctg | 2564 | | |
| CHST3 | 40 | 3′untranslated + 2202 | acacctcagaggagcctgtg G/A ttaacatttgtaggattatt | 2565 | | |
| CHST3 | 41 | 3′untranslated + 2569 | aggcctcatctggggtaggg C/G caagaggaaagtacagagtg | 2566 | | |
| CHST3 | 42 | 3′untranslated + 2717 | ctggaattcctccttagggc C/T ctgggaagagtattgcttaa | 2567 | | |
| CHST3 | 43 | 3′untranslated + 2753 | cttaacgcaggatgtgctgg G/A tgttttgtttcgggctttta | 2568 | | |
| CHST3 | 44 | 3′untranslated + 2800 | gcttggtgtctttcttgttt C/T atggctgtgtttttgctttt | 2569 | | |
| CHST3 | 45 | 3′untranslated + 3283 | ccgagggctgcccagctctg C/T ttctggtttcctggacaatt | 2570 | | |
| CHST3 | 46 | 3′untranslated + 3327 | ctgtcagatacggcccattg T/C aaacccagagggctgcattt | 2571 | | |
| CHST3 | 47 | 3′untranslated + 3787 | gttccccatgtggaggtcgg A/G ggggctgggactggggaggg | 2572 | | |
| CHST3 | 48 | 3′untranslated + 3860 | ggccctgctaatgtggacag T/C agactttatccctccttctt | 2573 | | |
| CHST3 | 49 | 3′untranslated + 4915 | ccagatgtgcatagaagcca G/A tctctgtcacatacaccgca | 2574 | | |
| CHST3 | 50 | 3′untranslated + 4993 | taaagcaaatttaggctttt G/A tccttctgcaatacatgcac | 2575 | | |
| CHST3 | 51 | 3′untranslated + 5223 | ggaaggagcttcagcaggag G/A tccttcccagaaggttgatt | 2576 | | |
| CHST3 | 52 | 3′untranslated + 5370 | tcatacctgtaatcccagca G/T ttggggaggccaaggtggga | 2577 | | |
| CHST3 | 53 | 3′untranslated + 5545 | ccattcccaaagtcagaaag T/C gaagccagatctcaagggct | 2578 | | |
| CHST3 | 54 | 3′untranslated + 5859 | caaaagcacaaagcagaatt G/C gcaacttcacttgtctca | 2579 | | |
| CHST3 | 55 | 3′untranslated + 5870 | cagaattggcaacttcac T/A tgtctcaagagctccaagat | 2580 | | |
| CHST3 | 56 | 3′untranslated + 5971 | ttccaaggctacagacatgg C/T gccatcctcacaggcctagc | 2581 | | |
| CHST3 | 57 | 3′untranslated + 6208 | atttcatgtctgcatggtac G/A agacaccccttcacggca | 2582 | | |
| CHST3 | 58 | 3′untranslated + 6223 | tacgagacaccccttcac G/A gcatacactgccatggtatg | 2583 | | |
| CHST3 | 59 | 3′flanking + 281 | agacaggagtgttgggccag C/T ggtcagggggcctggggatg | 2584 | | |
| CHST3 | 60 | 3′flanking + 997 | acctcttaaagtatttgagc C/T ggtgcctgtcatcccaacct | 2585 | | |
| CHST3 | 61 | intron1 + 22595 | cgggagcaggaaaaaaaaaa A/Δ gaataagaagaaaagaggct | 2586 | | |
| CHST3 | 62 | intron1 + (35423-35424) | gctcatgctcacagccactc AT/Δ gtatggagcaattgcctttt | 2587 | | |
| NDUFV1 | 1 | intron3 + 670 | ctgggtggagtggggtggca T/C ggagttgaagacccagtcct | 2588 | | |
| NDUFV1 | 2 | intron6 + 160 | tgtgccggccccagccctga C/G catgcatccctttggggacc | 2589 | | |
| NDUFV1 | 3 | intron9 + 27 | accacccttctgcgtagcac G/A gagggtgggtggcatcaagg | 2590 | | |
| NDUFV1 | 4 | 3′flanking + 1111 | tgtaggctgaggtcagcccc A/G atccagtccaaagcccaccc | 2591 | | |
| NDUFV1 | 5 | 3′flanking + 1658 | gaatgcggaagtgctctgtg G/A gcacccaccatgctccgggc | 2592 | | |
| NDUFV1 | 6 | 3′flanking + 1713 | gatctggggcggagggtaca C/T ggggctggcgctgggtgaag | 2593 | | |
| NDUFV1 | 7 | intron4 + 214 | tggtgtaaattttttttttt T/Δ gcttcaaaaatatagtattt | 2594 | | |
| NDUFV1 | 8 | 3′flanking + (772-774) | tgaactcggggttcagggtc TTC/Δ ctgtgaacactggttttgaa | 2595 | | |
| NDUFV2 | 1 | intron1 + 526 | ggaaatgctggctaaataaa C/T ggtatcaaactaactctgaa | 2596 | | |
| NDUFV2 | 2 | intron1 + 6689 | tcgttggatggtagtattgt T/G tgaacaacagaagaaattca | 2597 | | |
| NDUFV2 | 3 | intron1 + 14767 | ccaaatgcatgccagcagag C/T gtggcaggaaggtacacaag | 2598 | | |
| NDUFV2 | 4 | exon2 + 86 | aaggaatttgcataagacag T/C tatgcaaaatggagctggag | 2599 | | |
| NDUFV2 | 5 | intron2 − 29 | cagaagatcttactctctaa T/G gaagctggataacacttttt | 2600 | | |
| NDUFV2 | 6 | intron2 − 168 | tttactttggtaatcatact T/C atcaaatgtgtgtttagaca | 2601 | | |
| NDUFV2 | 7 | intron4 + 677 | aaaccacatactatttgatt C/A tgatgagaatcacataacca | 2602 | | |
| NDUFV2 | 8 | intron4 + 2295 | tatgattcaactttcaaaag A/T gtattgtgatatgaaataga | 2603 | | |
| NDUFV2 | 9 | intron5 + 102 | caacttctgccatcttattg G/A atctgtacttacctagtaat | 2604 | | |
| NDUFV2 | 10 | intron7 + 5466 | tggtaagaggctttaagata A/C caaatgctcagctttcagga | 2605 | | |
| NDUFV2 | 11 | intron1 + (13562-13563) | tactcttaaaattaatcctt (CTT) ttattataagtatacagtct | 2606 | | |
| NDUFV2 | 11 | intron1 + (13562-13563) | tactcttaaaattaatcctt ttattataagtatacagtct | 2607 | | |
| NDUFV3 | 1 | 5′flanking − 606 | aattacgactaacgttgggg A/G cgaactctttgctaaataaa | 2608 | | |
| NDUFV3 | 2 | 5′flanking − 222 | cgccgcgcccccgccacagc G/A cccaggcgcccgcagggcac | 2609 | | |
| NDUFV3 | 3 | 5′flanking − 111 | tggccccaagggaggcactt A/G gccctactggggatgcgcgc | 2610 | | |
| NDUFV3 | 4 | intron1 + 137 | ttgggccgctgaccccgctc C/T gagttacagtatcagcaaaa | 2611 | | |
| NDUFV3 | 5 | intron2 + 152 | tatacaagacacaagatcta T/C aacagattttagaccaaaca | 2612 | | |
| NDUFV3 | 6 | intron2 + 6304 | ttcacagatgaaggggttcc G/A aaatttttgtcaagaaagac | 2613 | | |
| NDUFV3 | 7 | intron2 + 6433 | tcgccttcgtcttcatcctc T/G tccagctcctctgattctga | 2614 | | |
| NDUFV3 | 8 | intron2 + 6563 | cctttgaaaacagagccccc C/T gagttacagtatcagcaaaa | 2615 | | |
| NDUFV3 | 9 | intron2 + 9619 | actatcttctgtgcgcatgc G/A cagagcccaccttgcagagc | 2616 | | |
| NDUFV3 | 10 | intron2 + 9858 | aggatgccagctctttaaat G/A agacatcgtttttgcttaac | 2617 | | |
| NDUFV3 | 11 | intron2 + 11673 | cttggtaggtaagcgcctgt A/G tgtgagccaagtcattcata | 2618 | | |
| NDUFA10 | 1 | 5′flanking − 1734 | tgcaccttgaactgtttact T/C tcctgtaaccatttaccctt | 2619 | | |
| NDUFA10 | 2 | 5′flanking − 1492 | aaaacatccatgcaaacagg T/C tgtgagaagttacgtctgcg | 2620 | | |
| NDUFA10 | 3 | intron3 + 370 | aagactgtgcatgtgccatg G/A agacagagatgtggatgcca | 2621 | | |
| NDUFA10 | 4 | intron3 + 2485 | ttgttattttcttttctctg G/A aatgcagtgatcagttgaca | 2622 | | |
| NDUFA10 | 5 | intron4 + 236 | ctgtgaaagcagattggagc C/T ctggacctcaaacacacgca | 2623 | | |
| NDUFA10 | 6 | intron4 + 1742 | tgtcggcatctgctgagtgt C/T tgctgaagtctgaggactgg | 2624 | | |
| NDUFA10 | 7 | intron4 + 2090 | ggctgggggaaagcagatca T/C gttggctaaaggacaggtgg | 2625 | | |
| NDUFA10 | 8 | intron4 + 3054 | cagctgattatactactgaa A/C cgggataaatgcagcttgat | 2626 | | |
| NDUFA10 | 9 | intron4 + 3066 | ctactgaaacgggataaatg C/T agcttgatgattttcagctg | 2627 | | |
| NDUFA10 | 10 | intron4 + 3377 | gtcacagtttaaatgctgct G/A ttttactctgtgtaagtagc | 2628 | | |
| NDUFA10 | 11 | intron5 + 46 | aagcatctctattttgaatg T/C agatcagcactaaaagccct | 2629 | | |
| NDUFA10 | 12 | intron8 + 1465 | gcaacgcccagttcctggta C/T aggcctcatatccagcgtgc | 2630 | | |
| NDUFA10 | 13 | intron8 + 1809 | cctggaggcacaaggatggc C/A ggggcactcaacttccctct | 2631 | | |
| NDUFA10 | 14 | intron8 + 11226 | gttgtgtgactgtgtggggc A/G tctcacctctcgggctgcag | 2632 | | |
| NDUFA10 | 15 | intron8 + 11319 | atcttgccttccctcctgcc G/A tctgttcaggcttgaatcct | 2633 | | |
| NDUFA10 | 16 | intron8 + 11386 | ccataatcctagcttgaacc C/T tcctttttccctgctgaccc | 2634 | | |
| NDUFA10 | 17 | intron8 + 12301 | acataattattgtaaacatg C/T cgcttaccagtgacattcat | 2635 | | |
| NDUFA10 | 18 | intron8 + 13361 | ccaggccactgattgctttc G/A cattttctagcattttctta | 2636 | | |
| NDUFA10 | 19 | intron9 + 183 | tttctgtgtggaaagctgat G/A aagtcctcagatgacagccc | 2637 | | |
| NDUFA10 | 20 | intron9 + 8669 | aataataatgaccatttctg G/T aaattcatagaattcctttt | 2638 | | |
| NDUFA10 | 21 | intron9 + 8028 | gaggacattccacagaacgt G/A tgactattagagcagaaggt | 2639 | | |
| NDUFA10 | 22 | intron9 + 10742 | ctggaggagaggggtggagc C/G agttcagccagcactggggt | 2640 | | |
| NDUFA10 | 23 | intron9 + 10985 | agaaagggttacacaggagc A/G cacttctcagggagtggtgt | 2641 | | |
| NDUFA10 | 24 | intron9 + 10989 | agggttacacaggagcacac T/C tctcagggagtggtgtgacg | 2642 | | |
| NDUFA10 | 25 | intron9 + 12601 | ctgtgaatcctctcacctgc G/A tgaagggcctggctgcctct | 2643 | | |
| NDUFA10 | 26 | intron9 + 13908 | cacattgttatgtaaccaag C/T ctggaattgcagtgtgaaga | 2644 | | |
| NDUFA10 | 27 | intron9 + 13911 | attgttatgtaaccaagcct G/T gaattgcagtgtgaagaact | 2645 | | |
| NDUFA10 | 28 | intron9 + 14064 | tcttgactattagaaaccct A/G tcagataaattttaaaacag | 2646 | | |
| NDUFA10 | 29 | intron9 + 14184 | tggctttggttgggaacagc G/A agagatacagaaccgacggt | 2647 | | |
| NDUFA10 | 30 | intron9 + 16487 | cttgaagctgatcgttccct C/A cttgaagctgatcgttccct | 2648 | | |
| NDUFA10 | 31 | intron9 + 16779 | gccagacgtgactgctttag G/A ttcctcatgacattcagacc | 2649 | | |
| NDUFA10 | 32 | intron9 + 17663 | ttccaaatcaccccagaact T/G tgcagtattttgaagctcct | 2650 | | |
| NDUFA10 | 33 | 5′flanking − (1668-1659) | gtaaaattgttttaactaga (C)9-11 ttcctaaaccaaggtataaa | 2651 | | |
| NDUFA10 | 34 | 5′flanking − (1355-1334) | ctgtatccattggaaggcac (A)15-21 tgcaaaggaaacaaggcaaa | 2652 | | |
| NDUFA10 | 35 | intron1 + (46 − 61) | tggcggggtggcagggtggc GGGGTGGCGGGGTGGG/Δ gag | 2653 | | |
| | | | AAGCTGATCGT/Δ gtccaagatagttgctagga | | | |
| NDUFA10 | 36 | intron4 + 2486 | ctcactggaacttttttttt T/Δ aatttaatttttaaaatttt | 2654 | | |
| NDUFA10 | 37 | intron7 + (1600-1601) | cacttccattctgactgtta (A) cggtgtgattcttcctgcca | 2655 | | |
| NDUFA10 | 37 | intron7 + (1600-1601) | cacttccattctgactgtta ctgtagacattttaaaccta | 2656 | | |
| NDUFA10 | 38 | intron9 + 1054 | gcgcgtgctgtttctccctt A/Δ tctgtccttgtacacgtgtg | 2657 | | |
| NDUFA10 | 39 | intron9 + (8161-8172) | tttctcgctttctgggagac (T)10-12 aatgttgaaaatatgtgttt | 2658 | | |
| NDUFA10 | 40 | intron9 + (8646-8647) | aattcccccattgcttctct (TT) ctgtagacattttaaaccta | 2659 | | |
| NDUFA10 | 40 | intron9 + (8646-8647) | aattccccattgcttctct ctgtagacattttaaaccta | 2660 | | |
| NDUFA10 | 41 | intron9 + (16503-16523) | ccctccttgaagctgatcgt TCCCTCCTTG | 2661 | | |
| | | | AAGCTGATCGT/Δ gtccaagatagttgctagga | | | |
| NDUFA10 | 42 | intron9 + (17905-17936) | caaatatatgtatacatgta (CA)12-18 tccttcatgaaaactctttc | 2662 | | |
| MGST1 | 37 | 5′flanking − 1376 | ttaataaatgtttattcaat T/G aaaccaactgctaatattct | 2663 | | |
| MGST1 | 38 | intron1A + 147 | cctggagattttaactttct G/A cgaagtttttaaaaaacaact 2664 | | | |
| MGST1 | 39 | intron1B + 36 | ggagaaggggaccgcatgca A/G agggtggcaggcagggaggg | 2665 | | |
| MGST1 | 40 | intron1C + 456 | ccccttgggacggttctcac C/T tgtgccccacttccccagtc | 2666 | | |
| MGST1 | 41 | intron1C + 719 | gcccgcaagcattgctgtat A/G gcacccaggcctccagtgag | 2667 | | |
| MGST1 | 42 | intron1C + 985 | cgagtaaaatttttctaccg C/G tttgttttagagtggtgtct | 2668 | | |
| MGST1 | 43 | intron2 + 3083 | aaaaaatttgtagatatggg T/G actccctatgttgcccaggc | 2669 | | |
| MGST1 | 44 | intron2 + 3106 | tccctatgttgcccaggctg A/G tcttgaattcttgggctcaa | 2670 | | |
| MGST1 | 45 | intron3 + 1703 | ttctcttctaagaagaagtc T/C gtgcagatacttagcacaaa | 2671 | | |
| MGST1 | 46 | intron3 + 2557 | tccagcatcttccctttcca T/C ttttaagttagacttttttt | 2672 | | |
| MGST1 | 47 | intron3 + 3032 | agagacatttagaatatatt C/A cctttaaaggtagagaataa | 2673 | | |
| MGST1 | 48 | intron3 + 3045 | atatattccctttaaaggta G/C agaataacccttcactgaga | 2674 | | |
| MGST1 | 49 | intron3 + 3289 | ggtttatagtgttccccccc T/A ccccgcccccaaaagaccca | 2675 | | |
| MGST1 | 50 | intron3 + 3885 | gaagctgccgctccaggaag G/C agtctgtcgttggagaagag | 2676 | | |
| MGST1 | 51 | intron3 + 3976 | ggaaagctggggaactgttt G/T cctggaacagagtctcaaaa | 2677 | | |
| MGST1 | 52 | intron3 + 4298 | tgtcaactgcgtaacacagg C/T gtagaagtggacattgtttt | 2678 | | |
| MGST1 | 53 | intron3 + 4519 | tttaatagaaaatggtattc C/T tgtcttttctttcccatctc | 2679 | | |
| MGST1 | 54 | 3′untranslated + 603 | gggtaaacccattttgaata T/C tagcattgccaatatcctgt | 2680 | | |
| MGST1 | 55 | 3′flanking + 147 | tatttgctttccttctctct C/T tgttttctttttctctgaaa | 2681 | | |
| MGST1 | 56 | 3′flanking + 237 | cagcacgtttttcctatgaa C/T aagacattctccaaataact | 2682 | | |
| MGST1 | 57 | 3′flanking + 1318 | tggctctgtgtgcatgaaca T/C gcacgcgtgcacgcgcacac | 2683 | | |
| MGST1 | 58 | 3′flanking + 1331 | atgaacatgcacgcgtgcac G/A cgcacacacacacacacaca | 2684 | | |
| MGST1 | 59 | intron1C + (904-923) | tgcgattatctttggtaatt (A)18-20 ggcaaatcagtccaaatttg | 2685 | | |
| MGST1 | 60 | intron1C + (3433-3434) | ccccttcaatactagaacaa (AA) gcagacacattaaatgttac | 2686 | | |
| MGST1 | 61 | intron1C + (3433-3434) | ccccttcaatactagaacaa gcagacacattaaatgttac | 2687 | | |
| MGST1 | 62 | intron1C + 5146 | actatttcaatttttttttt T/Δ ggagggggagacagagtctc | 2688 | | |
| MGST1 | 63 | intron2 + (552-563) | cccagcattataagaatgac (T)9-13 aagtgcagatgtggggaggg | 2689 | | |
| MGST1 | 64 | exon3 + (172-173) | tagcatttggcaaaggagaa AA/Δ tgccaagaagtatcttcgaa | 2690 | | |
| | | | agaaaactggatgtctgaaa TTGACA/GTCCAATAT cactg | | | |
| MGST1 | 65 | intron3 + (152-158) | TGGCTCACAT) agtcatcctctttgtgagac | 2691 | | |
| MGST1 | 66 | intron3 + (2198-2200) | ggattttagattcctcccta CTA/Δ ttctttccgaccttccaccc | 2692 | | |
| MGST1 | 67 | intron3 + (2571-2580) | tttccatttttaagttagac (T)9-10 cacctctctcgttacttcag | 2693 | | |
| | | | tcctcttcatgtctctatgt (GAGATGTTG | | | |
| MGST1 | 68 | intron3 + (4682-4683) | TGGCTCACAT) agtcatcctctttgtgagac | 2694 | | |
| MGST1 | 69 | intron3 + (4682-4683) | tcctcttcatgtctctatgt tgctctggagttgggcaact | 2695 | | |
| MGST1 | 70 | 3′flank+ (1359-1360) | acacacacacacacacacac CC/Δ tgctctggagttgggcaact | 2696 | | |
| MGST1 | 71 | 3′flank+ (1889-1891) | ttagaatagtttctaactat ACT/Δ tttactcccaagagaagctt | 2697 | | |
| HMG17L1 | 1 | 3′untranslated + 864 | ctttctgatttttgatagtc G/C gttgaagaagggagtttgaa | 2698 | | |
| UGT2A1 | 1 | 5′flanking − 1602 | ataacatcttctgcagagaa A/C cttcaatggaaatacactca | 2699 | | |
| UGT2A1 | 2 | 5′flanking − 1480 | tacagattatctttggtgat G/C ggagagcttagaagagacat | 2700 | | |
| UGT2A1 | 3 | 5′flanking − 1406 | atttcagaagatttattaac A/T tgaaaaggatcactctgctt | 2701 | | |
| UGT2A1 | 4 | 5′flanking − 1388 | acatgaaaaggatcactctg C/T ttattcacagacatatgcat | 2702 | | |
| UGT2A1 | 5 | 5′flanking − 935 | aaattattcaatctctttgg G/A cagtggtttctttttctttg | 2703 | | |
| UGT2A1 | 6 | 5′flanking − 287 | cctgaatgtagagttgagat G/A tacagaagctttatccaatt | 2704 | | |
| UGT2A1 | 7 | 5′flanking − 128 | gagaagtaagacacattacc C/T ataaatctgtaaatctccta | 2705 | | |
| UGT2A1 | 8 | intron1 + 535 | cattgatcagggtgatttat C/T catgctaagcttatttaatt | 2706 | | |
| UGT2A1 | 9 | intron1 + 642 | tatattgatcatgttgatac A/C tttatacacatatttgtcta | 2707 | | |
| UGT2A1 | 10 | intron1 + 1221 | ttttaatctaataagcaatt C/G aggaccatctaaagggaaat | 2708 | | |
| UGT2A1 | 11 | intron1 + 1448 | aggtgcttacaggcaacatc C/T acatagcagtctgtggctgg | 2709 | | |
| UGT2A1 | 12 | intron1 + 2000 | gacacattagcttcttttct A/G cagatctctgttctaaaaca | 2710 | | |
| UGT2A1 | 13 | intron1 + 3118 | cttaaaattctttaatgaaa T/G cattgcaacaaatttatatc | 2711 | | |
| UGT2A1 | 14 | intron1 + 3191 | ataaatagaacaactcccta A/T gtttacttctctgcagtgga | 2712 | | |
| UGT2A1 | 15 | intron1 + 3770 | atcaccagataatttactat C/T cattaaggagtaggtcatca | 2713 | | |
| UGT2A1 | 16 | intron1 + 4584 | tgattggttagaatctttga A/C aaatcttctagtatcattcc | 2714 | | |
| UGT2A1 | 17 | intron1 + 4854 | tactctgtgcattgttaata G/A cctatcacttgtggtctgcc | 2715 | | |
| UGT2A1 | 18 | intron1 − 19146 | ctgtttaaattctcattcaa C/T ggccacatggttaaaataaa | 2716 | | |
| UGT2A1 | 19 | intron1 − 18346 | atggcaatatttttagaaat G/A ttaactcccaataatgaata | 2717 | | |
| UGT2A1 | 20 | intron1 − 18218 | tatatcattattttaactta T/G agatagcactagccctaatt | 2718 | | |
| UGT2A1 | 21 | intron1 − 17937 | ctcctaataatttggactca C/T catacttattcagcactatc | 2719 | | |
| UGT2A1 | 22 | intron1 − 12585 | ttccacacagggacaagtca A/G cagaggaaatttttcttgct | 2720 | | |
| UGT2A1 | 23 | intron1 − 11430 | aacaaaggtttattttctta C/G agttctgatggctagacgtc | 2721 | | |
| UGT2A1 | 24 | intron1 − 10761 | tttaaaatatgcatgtattt T/G ccacttttaaaaactatatc | 2722 | | |
| UGT2A1 | 25 | intron1 − 381 | aaatcctccctccttccttc C/T tttccccaggcccactctac | 2723 | | |
| UGT2A1 | 26 | intron1 − 329 | ttccctttctccttttctcc A/G tctctctctcttcctctctc | 2724 | | |
| UGT2A1 | 27 | intron1 + 41 | ttttctcctcagcaaacata T/A aagctaatttcctccatcca | 2725 | | |
| UGT2A1 | 28 | intron2 + 263 | caccttgatactggacttgg T/C gggacagaaaaccagatcat | 2726 | | |
| UGT2A1 | 29 | intron2 + 454 | agaaagcccattgaaataag G/C cagggtttttaggttttaat | 2727 | | |
| UGT2A1 | 30 | intron2 + 554 | aaaaacttttttgagttgac A/T atggtgagtttagtttctga | 2728 | | |
| UGT2A1 | 31 | intron2 + 1113 | ctgcaggcaagctctagtga A/T tgtttattataggaaataat | 2729 | | |
| UGT2A1 | 32 | intron2 + 1304 | gacaaatcagccatgtttta C/T aatagcagacattatgccat | 2730 | | |
| UGT2A1 | 33 | intron2 + 1305 | acaaatcagccatgttttac A/G atagcagacattatgccatt | 2731 | | |
| UGT2A1 | 34 | intron2 + 1367 | atcgatataggctttgggaa A/C tatgaataccaaccatgggt | 2732 | | |
| UGT2A1 | 35 | intron2 + 2074 | aaattttttcttagacctat G/T aatcaaaggaggcatacagt | 2733 | | |
| UGT2A1 | 36 | intron2 + 2164 | attttattagatataactgg A/C atgctaacaattttaaaagc | 2734 | | |
| UGT2A1 | 37 | intron2 + 2298 | taacaatttcagttagcatg A/C gaagagttgtcccttattta | 2735 | | |
| UGT2A1 | 38 | intron2 + 2346 | tttctgtaatggttttgctt T/C catgcttggacttgtaatca | 2736 | | |
| UGT2A1 | 39 | exon3 + 922 | gtgttgtggtgttttctctg G/A gatcaatggtcaaaaacctt | 2737 | | |
| UGT2A1 | 40 | intron3 − 217 | aagcttagaagtgataaata T/C caaaacaataatactatact | 2738 | | |
| UGT2A1 | 41 | exon5 − 194 | aaacaataatactatactgg G/A tagactattagtacaagact | 2739 | | |
| UGT2A1 | 42 | intron5 + 1171 | acggagtccctatggtggga G/A ttcccatgtttgctgatcag | 2740 | | |
| UGT2A1 | 43 | intron5 + 1546 | tttttaaaattcagaaactc A/G gttatggtgtattcttacaa | 2741 | | |
| UGT2A1 | 44 | intron5 + 1547 | ttttaaaattcagaaactca G/A ttatggtgtattcttacaaa | 2742 | | |
| UGT2A1 | 45 | intron5 + 2013 | atcatattcattaccctccc G/T ctattattgtattttgaatc | 2743 | | |
| UGT2A1 | 46 | intron5 + 2318 | aatttagtgctttttcttaa C/T ggaagtaacctgcttaaaaa | 2744 | | |
| UGT2A1 | 47 | intron5 + 2505 | taattgacttttattaatac G/A tacatgttgtataagtcata | 2745 | | |
| UGT2A1 | 48 | intron5 + 2639 | tagactattacaaagttgtt A/G gttgctgacaattttgttca | 2746 | | |
| UGT2A1 | 49 | intron5 + 4009 | gaatccaggctggaactttt C/A ttccagacacaaaccaaaat | 2747 | | |
| UGT2A1 | 50 | intron5 + 4311 | atacagacactgtccttttc G/A tcacaaacatacagatgtgt | 2748 | | |
| UGT2A1 | 51 | intron5 + 4545 | agctcacacagtatcaaaat T/C atttttggaaaaattatgct | 2749 | | |
| UGT2A1 | 52 | intron5 + 4616 | acttttttatgtctacattt G/C atcatactgtgttaagcata | 2750 | | |
| UGT2A1 | 53 | intron5 + 4717 | tgcaagaattatattttctc C/A acgtaactatggccttaaac | 2751 | | |
| UGT2A1 | 54 | exon6 + 1524 | gctatatttttggtcataca A/G tgttgtttgttttcctgtca | 2752 | | |
| UGT2A1 | 55 | 3′untranslated + 1683 | aaggagtttaacaaaaacac G/A tctcccatcctgtttccaaa | 2753 | | |
| UGT2A1 | 56 | 3′flanking + 685 | aatctagaaaataattatca T/C ttttataaaatttttagtca | 2754 | | |
| UGT2A1 | 57 | intron1 − (18967-18965) | ctcccaattagattgattag TAT/Δ gagttcctggggttactggt | 2755 | | |
| UGT2A1 | 58 | intron1 − (18862-18803) | ttgtgtgtatgtgtatgttt (AC)14-17 tattttaatgaattaatatc | 2756 | | |
| UGT2A1 | 59 | intron1 − (17463-17447) | gcttagtatattatatatat (A)16-27 gtaaagaaaatggcagagaa | 2757 | | |
| UGT2A1 | 60 | intron1 − 10860 | attcaatgcaactttttttt T/Δ gtaatggcagaattagaaca | 2758 | | |
| UGT2A1 | 61 | intron2 + (528-538) | ctgttaggaaacaattggtt (A)16-27 gtaaagaaaatggcagagaa | 2759 | | |
| UGT2A1 | 62 | intron2 + (1514-1533) | ttgtgtgtatgtgtatgttt (GT)9-11 tattttaatgaattaatatc | 2760 | | |
| UGT2A1 | 63 | intron5 + (916-917) | gcttagtatattatatatat AA/Δ gtctatatatatagcttagt | 2761 | | |
| UGT2A1 | 64 | intron5 + 1163 | caatatttatgtcatttttt T/Δ ctcacatttactctgtttcc | 2762 | | |
| UGT2A1 | 65 | intron5 + (3819-3838) | agacagacagacacacaaac (AC)8-12 tcaacacatgtaaactactc | 2763 | | |
| UGT2A1 | 66 | intron5 + 4785 | tatcttcaatgaaaataaaa A/Δ caaaaattgtctaatttctg | 2764 | | |
| CATP1 | 1 | 5′flanking − 916 | acagcgtagatgttcaataa G/A tatttgttgtatctgtgaga | 2765 | | |
| CATP1 | 2 | 5′flanking − 843 | tagtgcagcgactatgcctt G/A atgtgtgtgtgtttgggatt | 2766 | | |
| CATP1 | 3 | 5′flanking − 526 | aaatgtgtgcctgtatgtta T/C acatctgtacatatatttcc | 2767 | | |
| CATP1 | 4 | 5′flanking − 172 | acaaacacaactcaaagtat G/A tgtgttattaaaagtagcta | 2768 | | |
| CATP1 | 5 | intron1 + 206 | ttgattcaggcaagttagtc C/G taaatggctttgagagactt | 2769 | | |
| CATP1 | 6 | intron1 + 454 | caacataacaataatttcct G/A taagaaaaatggccattttg | 2770 | | |
| CATP1 | 7 | intron1 + 999 | gtttagcaaggttagatatt A/G atgtggatgttaagacaaaa | 2771 | | |
| CATP1 | 8 | intron1 + 1223 | ttgctagaagctagtaggac C/T agctttataaatacagagat | 2772 | | |
| CATP1 | 9 | intron1 + 1326 | aactagttaggcaacccatg T/C gttttaggggaaaagcaatg | 2773 | | |
| CATP1 | 10 | intron1 + 1336 | gcaacccatgtgttttaggg G/A aaaagcaatgaggtcatgat | 2774 | | |
| CATP1 | 11 | intron1 + 1498 | atagtttgctcttaagaata C/T actctgagaaggtttatagt | 2775 | | |
| CATP1 | 12 | intron1 + 5041 | ttatgctcccgaggagttag C/T tctctaaatgcataaggaga | 2776 | | |
| CATP1 | 13 | intron1 + 9532 | aaaaagttatatagaaatat A/G agtgtcactcctttctagtt | 2777 | | |
| CATP1 | 14 | intron2 + 198 | ttacctcatattaacaccta A/C atattgccacatatcctacc | 2778 | | |
| CATP1 | 15 | intron2 + 961 | aaaaagttatatagaaatat A/G agtgtcactcctttctagtt | 2779 | | |
| CATP1 | 16 | intron2 + 1110 | gtctactagtgttcaactcc T/C ttagatcttagcctgtatca | 2780 | | |
| CATP1 | 17 | intron2 + 1419 | aaagcctaagaaggatgcag T/C gcaatagcctatgtgagaag | 2781 | | |
| CATP1 | 18 | intron2 + 3339 | tatggtttgcaaaaaactta T/C tcgtatatttgtttttttca | 2782 | | |
| CATP1 | 19 | intron3 + 66 | caggaaatgaagttgcactt T/C cctctctaggagcaatgctt | 2783 | | |
| CATP1 | 20 | intron3 + 205 | tcagttttgtcaatttacac A/G atggggatttgggacctttt | 2784 | | |
| CATP1 | 21 | intron3 + 6377 | aatgaatagactttgagtta C/T tggatttttagtggataaat | 2785 | | |
| CATP1 | 22 | intron3 + 7238 | tgaatgtcacattttttaaa G/A tttgtgttccttatctcata | 2786 | | |
| CATP1 | 23 | intron4 + 1016 | ttttattctggattcatgtt T/C gtggaaattgcagtagtcca | 2787 | | |
| CATP1 | 24 | intron5 + 110 | tccacaatgatgagtagagt A/G tcttggcacagttggccttc | 2788 | | |
| CATP1 | 25 | intron6 + 496 | agtgtctgaattataagcca A/G ttttatagttggttgggacc | 2789 | | |
| CATP1 | 26 | intron7 + 1934 | aaagtgaaaggaaattaaaa G/C tgagaacttgagcctgaatg | 2790 | | |
| CATP1 | 27 | intron7 + 2140 | tagaatgtaccaaatgaatc A/G gcatctctgaggatgggacc | 2791 | | |
| CATP1 | 28 | intron7 + 2365 | tgaaatcttctttatcaact C/T gattttcctccagactttac | 2792 | | |
| CATP1 | 29 | intron8 + 88 | gcaaactcctaagttgaagt G/C ttttaggatattttttgact | 2793 | | |
| CATP1 | 30 | intron9 + 534 | tcatattttgtattttaaag G/A ttatctgggttttactgaaa | 2794 | | |
| CATP1 | 31 | intron9 + 1286 | tattcttctgagataaatca T/C tgaaggagtggctatgtggt | 2795 | | |
| CATP1 | 32 | intron11 + 215 | ttcactcctattcctcgcta C/T ttttcttccttatttcttag | 2796 | | |
| CATP1 | 33 | intron11 + 663 | ttcttcttcttttggagctc T/A aaagtagagttcagttaatc | 2797 | | |
| CATP1 | 34 | intron11 + 999 | atcatcactgcatgagagtt A/G gaattatctaactttgtgat | 2798 | | |
| CATP1 | 35 | intron11 + 16727 | tttcttttatttacaaactt A/G tttacttttcaggtgtatga | 2799 | | |
| CATP1 | 36 | intron12 + 48 | ctatcagaacaatattatta T/G tattattttttattacactt | 2800 | | |
| CATP1 | 37 | intron12 + 686 | tatgttttgataaactttgc C/A gtacaaataaagacaattga | 2801 | | |
| CATP1 | 38 | intron12 + 708 | tacaaataaagaaaattgaa A/G tatttccaaataaatcaagt | 2802 | | |
| CATP1 | 39 | intron13 + 418 | tctctggtctccaaaatcat A/G tattttctccctctttacat | 2803 | | |
| CATP1 | 40 | intron13 + 436 | atatattttctccctcttta C/A attttgctgaaacaatcttc | 2804 | | |
| CATP1 | 41 | 3′untranslated + 2130 | gtctttaagaacctaaaaaa C/A ctcttaactcaaaataataa | 2805 | | |
| CATP1 | 42 | 3′flanking + 57 | agtgactaaagtttttctta C/A aaacaagtgtctgaatcaaa | 2806 | | |
| CATP1 | 43 | 3′flanking + 572 | aatacactatggttatttat G/A tgtactataaatggagtgag | 2807 | | |
| CATP1 | 44 | 3′flanking + 788 | atttcctaaatgatcagatg C/T atcatatgaaaaaagaaagc | 2808 | | |
| CATP1 | 45 | 3′flanking + 1356 | aggtgactgacataaatggg G/A gcagaggacataatgaggtt | 2809 | | |
| CATP1 | 46 | 5′untranslated + (189-188) | attttctaatctgtattaaa (A) gcgttccaggtatttttgta | 2810 | | |
| CATP1 | 47 | 5′untranslated + (189-188) | attttctaatctgtattaaa gcgttccaggtatttttgta | 2811 | | |
| CATP1 | 48 | intron4 + (725-726) | tgatctttaatagcggggaa AA/Δ caggcaagtacgctatagtt | 2812 | | |
| CATP1 | 49 | intron4 + (1082-1083) | attgagtcaggaaaccaaaa CA/Δ gtttcaaaaatttgaaaaat | 2813 | | |
| CATP1 | 50 | intron4 + 2301 | aatgtcatgtcttttttttt T/Δ aatgcagagtgtacaaagga | 2814 | | |
| CATP1 | 51 | intron9 + (241-246) | attgtatgtgcatgtgggtg TGTGTG/Δ catgattgtctttgtgatat | 2815 | | |
| CATP2 | 1 | 5′flanking − 2574 | ggataaggcaacccctatgt A/G tcactgctgcaggagaggga | 2816 | | |
| CATP2 | 2 | 5′flanking − 2366 | aacataggaatgtgcagagc C/T ctgtggggattagagaagag | 2817 | | |
| CATP2 | 3 | 5′flanking − 2244 | tgatgatgccagagctttga T/G cattggtgggtatagaaaca | 2818 | | |
| CATP2 | 4 | 5′flanking − 1723 | tctttcagacttcaaaggcc A/G tgatatttcatcagagctgt | 2819 | | |
| CATP2 | 5 | 5′flanking − 1180 | tgcttatttaacaggcataa T/G ctttggtctcctgagccaga | 2820 | | |
| CATP2 | 6 | 5′flanking − 811 | tatgtgcatatgtgtataca G/A gtaaaagtgtgtatatatgt | 2821 | | |
| CATP2 | 7 | intron1 + 7188 | aatcatttgaaatttaagaa A/G aaaatatgttcagagaaaaa | 2822 | | |
| CATP2 | 8 | intron1 + 7331 | gtgaaatgaggaacaaagtg T/C ccacctttttttcctgaata | 2823 | | |
| CATP2 | 9 | intron1 + 7391 | agagagatgtgaaatagtat T/G tttctggggaagtaggggaa | 2824 | | |
| CATP2 | 10 | intron1 + 7886 | ttgttagtagaaagaaaatc G/A aagcctaaaactaaaggaag | 2825 | | |
| CATP2 | 11 | intron1 + 7958 | ttgctattatataatttttt T/A aaaaaaagatttcctaatat | 2826 | | |
| CATP2 | 12 | intron1 + 7959 | tgctattatataattttttt A/T aaaaaagatttcctaatatt | 2827 | | |
| CATP2 | 13 | intron1 + 8036 | ggaaaaaatggggtgaaatt A/T atcaaagggcagcttattaa | 2828 | | |
| CATP2 | 14 | intron1 + 9164 | acattatattctatataaaa G/T agtcagttgaagtaaaaagt | 2829 | | |
| CATP2 | 15 | intron1 + 10123 | tctgtctttcctacttttgt T/G tccagcattgacctagcaga | 2830 | | |
| CATP2 | 16 | intron2 + 193 | tgattaagtatttctttggc G/A aaatttttgatgcttaatag | 2831 | | |
| CATP2 | 17 | intron2 + 1020 | ttgagtaacatttaggccaa G/A tggcagtcataaggaaaaag | 2832 | | |
| CATP2 | 18 | intron2 + 14865 | agaggaattaatcataagag G/A tggcagtcataaggaaaaag | 2833 | | |
| CATP2 | 19 | intron2 + 14931 | gttagttaataacagaaaaa A/T tatcagaaattttaaaaaat | 2834 | | |
| CATP2 | 20 | intron2 + 15417 | ttctaaaataagtaagctaa A/T tattctatattatactacta | 2835 | | |
| CATP2 | 21 | intron2 + 20823 | ttgtataagagatacaaaac A/C aattcctactaggggaaata | 2836 | | |
| CATP2 | 22 | intron2 + 20852 | ctaggggaaataaagcttca G/C taaggaggtggcattaagct | 2837 | | |
| CATP2 | 23 | intron2 + 20930 | atggagagaagcagcagtgt A/G ccacagataaatgaagtgag | 2838 | | |
| CATP2 | 24 | intron2 + 21360 | ttcaaaagctgtatttctca T/C tagtgctttttgtgaataaa | 2839 | | |
| CATP2 | 25 | intron2 + 21467 | tatatacacaatacctgtcc A/G gaagatgtggtataagccaa | 2840 | | |
| CATP2 | 26 | intron2 + 21621 | tatcaatacttatgaagaga A/G ctaactattctaactaggga | 2841 | | |
| CATP2 | 27 | intron2 + 22760 | ttccccacctcctgttggtt C/G tcctcttaaacttctccttg | 2842 | | |
| CATP2 | 28 | intron2 + 23199 | cctatctgcacataacatta C/T aaacttatggcaattataaa | 2843 | | |
| CATP2 | 29 | intron2 + 23218 | acaaacttatggcaattata A/G aactcaatacatattatact | 2844 | | |
| CATP2 | 30 | intron2 + 23330 | gcccttgttcctgttcctct G/A tacctgcctcaactacatag | 2845 | | |
| CATP2 | 31 | intron2 + 23673 | ctggagacggtagctcaaac T/C gaggatgaaaatagacattt | 2846 | | |
| CATP2 | 32 | intron3 + 89 | ggttatcaactggggtaaat T/G tatctctcacaggcaatttg | 2847 | | |
| CATP2 | 33 | intron3 + 224 | tgctaaatattctataatgc A/G caaagaatgatgtaactgaa | 2848 | | |
| CATP2 | 34 | intron4 + 97 | ccctttaaataggcagttac C/A ttttgagaagatacccacta | 2849 | | |
| CATP2 | 35 | intron4 + 568 | ttcatgatccaaattgtggc A/G acgtatttccaggcaacaag | 2850 | | |
| CATP2 | 36 | intron4 + 599 | aggcaacaagatagaagaag A/G aaagaataagaagcaacaaa | 2851 | | |
| CATP2 | 37 | intron4 + 753 | aaaatagacattattccaag T/A taccaagttcccggttaaaa | 2852 | | |
| CATP2 | 38 | intron4 + 781 | ttcccggttaaaaatcccaa G/C tataattactgtggaaggaa | 2853 | | |
| CATP2 | 39 | intron4 + 1196 | aaggaccacaatctagatca G/T cattgctctaaatatgccat | 2854 | | |
| CATP2 | 40 | intron4 + 1229 | tatgccataatatgtgacaa T/C tttgcacctggtatttctac | 2855 | | |
| CATP2 | 41 | intron4 + 1623 | catctagttgaaatggatta G/C attttatttttactacattt | 2856 | | |
| CATP2 | 42 | exon5 + 388 | attctaaagaaactaatatc A/G attcatcagaaaattcaaca | 2857 | | |
| CATP2 | 43 | exon5 + 452 | taatcaaattttatcactca A/G tagagcatcacctgagatag | 2858 | | |
| CATP2 | 44 | intron5 + 165 | ttaatatacacagttcgccc A/T ttaacaacacaggtttaaac | 2859 | | |
| CATP2 | 45 | intron5 + 189 | acaacacaggtttaaactac G/A cgttttcacttctatgcaaa | 2860 | | |
| CATP2 | 46 | intron5 + 191 | aacacaggtttaaactacgc G/A ttttcacttctatgcaaatt | 2861 | | |
| CATP2 | 47 | intron5 + 507 | atataactttgctttcattg C/T aaaaggcaaactgttatatc | 2862 | | |
| CATP2 | 48 | intron5 + 520 | ttcattgcaaaaggcaaact A/G ttatatcatttaaagacttt | 2863 | | |
| CATP2 | 49 | intron5 + 856 | agtcatgataaacctaatag A/G ataaaacaacaaaaaagaaa | 2864 | | |
| CATP2 | 50 | intron5 + 1157 | acagataatttttacttgtt T/C gtgcttttctgtatgatatg | 2865 | | |
| CATP2 | 51 | intron5 + 1226 | ccttgattgtaataatctcc A/C catgccaagagtggggccag | 2866 | | |
| CATP2 | 52 | intron5 + 1228 | ttgattgtaataatctccac A/C tgccaagagtggggccaggt | 2867 | | |
| CATP2 | 53 | intron5 + 1304 | actgttctcgtggtaatgaa G/T aagtctcacaagatctgatg | 2868 | | |
| CATP2 | 54 | intron5 + 1348 | ttataaatgagagttcccct G/A caaaagctctcttgcctgcc | 2869 | | |
| CATP2 | 55 | intron5 + 1407 | ttgctcttccttcatcttcc G/A ccatgattgtgaggcccccc | 2870 | | |
| CATP2 | 56 | exon6 + 521 | gtcatacatgtggatatatg T/C gttcatgggtaatatgcttc | 2871 | | |
| CATP2 | 57 | exon6 + 571 | gggagactcccatagtacca T/C tggggctttcttacattgat | 2872 | | |
| CATP2 | 58 | exon6 + 597 | ctttcttacattgatgattt C/T gctaaagaaggacattcttc | 2873 | | |
| CATP2 | 59 | intron7 + 33 | agaacaaggtaccatgataa C/T gtctttctaagcacacatgc | 2874 | | |
| CATP2 | 60 | intron7 + 267 | caaaataaccaaatgtaaaa T/A gtctccctcccaaactgact | 2875 | | |
| CATP2 | 61 | intron7 + 1260 | gtaatctcacatttctctgc A/G tttacacttggtaaaacttt | 2876 | | |
| CATP2 | 62 | intron7 + 1386 | agtctcaaattaatagccaa G/A agcatgcctttattgtaacc | 2877 | | |
| CATP2 | 63 | intron7 + 1472 | ctttaccacatgacagaatg G/A catgttcttagcaaataata | 2878 | | |
| CATP2 | 64 | intron7 + 1697 | tttacatgttcaattttaga C/A atatgccttagagtagctac | 2879 | | |
| CATP2 | 65 | intron7 + 2273 | ttctcacgtcctatctagcg C/T gattatgacccttagttact | 2880 | | |
| CATP2 | 66 | intron8 + 207 | gtggaagagaattaggtttg T/C actttttagcagggagaaac | 2881 | | |
| CATP2 | 67 | intron8 + 546 | tcgggagaagtttctcccta T/C gtaattagagtaatatttat | 2882 | | |
| CATP2 | 68 | intron8 + 565 | atgtaattagagtaatattt A/C ttttggtaattatctatcta | 2883 | | |
| CATP2 | 69 | intron8 + 668 | taagtaatgtaaattaggat G/T catcagcatttgacagtgcc | 2884 | | |
| CATP2 | 70 | intron8 + 739 | tggagaaccattgagagtca A/G taaacaaagagaatgacttg | 2885 | | |
| CATP2 | 71 | intron8 + 2193 | tgatcacagatccaaatgac A/G taatttctaccatgaacaga | 2886 | | |
| CATP2 | 72 | intron9 + 112 | attttagtaatacaggataa G/C tataattttcttgtattctt | 2887 | | |
| CATP2 | 73 | intron9 + 266 | ttagaggtagtatctgtata A/G ttggatcttataatttagtg | 2888 | | |
| CATP2 | 74 | intron9 + 305 | tgctaagatctgagacaaac C/G cttttgtaattataatcatt | 2889 | | |
| CATP2 | 75 | intron9 + 888 | aggttctgtatgttttttaa T/C aaatgacaaagatatattaa | 2890 | | |
| CATP2 | 76 | intron11 + 10224 | tacacttgttccataaaaaa T/C tcctctatattattcctagt | 2891 | | |
| CATP2 | 77 | intron11 + 10359 | attaatagattcaccgtgag G/C ttcccttaaactttagccta | 2892 | | |
| CATP2 | 78 | intron11 + 10916 | cttatatagaaagaaatcca C/G aaaactattttaccttttat | 2893 | | |
| CATP2 | 79 | intron11 + 10997 | aatatattagtttgaacaag T/C gagacttcactaaatataat | 2894 | | |
| CATP2 | 80 | intron11 + 11018 | gagacttcactaaatataat G/A caatgtatttgcagcactgt | 2895 | | |
| CATP2 | 81 | intron12 + 442 | aacattccaaaacttttaat C/T gactcacagcatgactttta | 2896 | | |
| CATP2 | 82 | intron12 + 445 | attccaaaacttttaatcga C/T tcacagcatgacttttataa | 2897 | | |
| CATP2 | 83 | intron12 + 447 | tccaaaacttttaatcgact G/A acagcatgacttttataata | 2898 | | |
| CATP2 | 84 | intron12 + 907 | aatgaaaagaagctggcaga T/C tgaaacatactgaatgagag | 2899 | | |
| CATP2 | 85 | intron13 + 65 | tatatatatatatatatata C/T acacacacatacatatatta | 2900 | | |
| CATP2 | 86 | intron13 + 870 | aattctgagtatcctatttc G/A atgtatccaatctgtggcac | 2901 | | |
| CATP2 | 87 | intron13 + 1935 | taaaaaaaaaaaaagtctgc T/C tttacagcaattgagccaag | 2902 | | |
| CATP2 | 88 | intron13 + 2261 | aacgaatcctccaaattttt G/C aacttttatttaatcaaaat | 2903 | | |
| CATP2 | 89 | intron14 + 248 | tcaaggataataaccaactt G/A tcaaaaatcagagataatag | 2904 | | |
| CATP2 | 90 | intron14 + 2463 | atttgtttactaatatggaa C/G cttcttcaagacatattttt | 2905 | | |
| CATP2 | 91 | intron14 + 2857 | tcatcatgtatttccaggac A/T cctggcaagatgctcctcag | 2906 | | |
| CATP2 | 92 | intron14 + 11458 | atctccagaggtcctgctgt C/T tcccaaagtcccactgaccc | 2907 | | |
| CATP2 | 93 | 3′untranslated + 2243 | ataataaaacaaactgtagg T/C agaaaaaatgagagtactca | 2908 | | |
| CATP2 | 94 | 3′untranslated + 2404 | tcttaataaaacaaatgagt A/G tcatacaggtagaggttaaa | 2909 | | |
| CATP2 | 95 | 3′untranslated + 2515 | cagagtttgaactataatac T/G aaggcctgaagtctagcttg | 2910 | | |
| CATP2 | 96 | 3′untranslated + 2539 | gcctgaagtctagcttggat A/G tatgctacaataatatctgt | 2911 | | |
| CATP2 | 97 | intron1 + 457 | taattggcaaacataaaaaa (A) caggtgtctcaaagtcacat | 2912 | | |
| CATP2 | 98 | intron1 + 457 | taattggcaaacataaaaaa caggtgtctcaaagtcacat | 2913 | | |
| CATP2 | 99 | intron1 + (7537-7538) | gatcagcattacaaccaaga (G) atggagaatgacattcagga | 2914 | | |
| CATP2 | 100 | intron1 + (7537-7538) | gatcagcattacaaccaaga atggagaatgacattcagga | 2915 | | |
| CATP2 | 101 | intron1 + (10032-10035) | tgtgtgattctatattactt ACTT/Δ gtttcaaatttctctccaca | 2916 | | |
| CATP2 | 102 | intron1 + (10058-10061) | ttcaaatttctctccacaaa TTTA/Δ tttttctattaaattgtaat | 2917 | | |
| CATP2 | 103 | intron2 + (413-423) | acttatttaaaaattctttt (A)11-13 caaaaaacaggattttaaaaa | 2918 | | |
| CATP2 | 104 | intron3 + (1595-1603) | ttgccaagtaattcaagtgc (T)8-10 gtatttaaaacaacttttca | 2919 | | |
| CATP2 | 105 | intron4 + (10-23) | ttcatgggatagtaagtgtt (A)12-14 cctctgtgccactatcagta | 2920 | | |
| CATP2 | 106 | intron5 + (1567-1572) | gtgaatataaattacttgta CTTGTA/Δ aattaaaaaaaaataagtag | 2921 | | |
| CATP2 | 107 | intron5 + (1577-1585) | attacttgtacttgtaaatt (A)9-10 taagtagaataattaagagt | 2922 | | |
| CATP2 | 108 | intron8 + (1939-1941) | ttctctaactccttctactc CTT/Δ atttcaagcagatgcaactg | 2923 | | |
| CATP2 | 109 | intron10 + (3077-3078) | aaattctttatctacttttt (CTT) ttccctctttctctgctttc | 2924 | | |
| CATP2 | 110 | intron10 + (3077-3078) | aaattctttatctacttttt ttccctctttctctgctttc | 2925 | | |
| CATP2 | 111 | intron11 + 11011 | aacaagtgagacttcactaa A/Δ tataatgcaatgtatttgca | 2926 | | |
| CATP2 | 112 | intron12 + (1160-1169) | agcatgacatggtagagatg (A)9-11 gcatttttaacatttgttaa | 2927 | | |
| CATP2 | 113 | intron12 + (1310-1312) | tccatcttaatataaaatgt TGT/Δ ctactcaaaaggagaagtct | 2928 | | |
| CATP2 | 114 | intron13 + (9-34) | tacgagcactaggtatgatg (A)24-27 tatatatatatatatatata | 2929 | | |
| CATP2 | 115 | intron13 + (35-64) | aaaaaaaaaaaaaaaaaaaa (TA)10-21 cacacacacatacatatatt | 2930 | | |
| CATP2 | 116 | intron13 + (1379-1387) | aaaattattcaccacaatac (A)8-10 caaagtaaagttatgaacac | 2931 | | |
| CATP2 | 117 | intron13 + (1916-1928) | aattctcttaaaataatgtt (A)11-13 gtctgcttttacagcaattg | 2932 | | |
| CATP2 | 118 | intron14 + (588-596) | caattatactttacctcttt (A)8-10 ctaatttcaaattcatatat | 2933 | | |
| CATP8 | 1 | 5′flanking − 1413 | aataggggcttaataactct G/C aaacttatgatttctcatat | 2934 | | |
| CATP8 | 2 | 5′flanking − 1345 | gaatttatcctacagatatg A/G ccacacagaaaatgacatat | 2935 | | |
| CATP8 | 3 | intron1 + 38962 | atgaaattagtttaaaaata G/A caaccttaactatactcctc | 2936 | | |
| CATP8 | 4 | intron2 + 253 | acagacttaccaacaaagaa T/G tatccttcccaaaatgtcta | 2937 | | |
| CATP8 | 5 | intron2 + 329 | actcatggtttgcaaattaa C/G tttttaggaaactttatctc | 2938 | | |
| CATP8 | 6 | intron2 + 2568 | ccattctggtgctttctttc G/A tgaaactattttccatcagt | 2939 | | |
| CATP8 | 7 | intron2 + 2679 | ctcttattgctcttcttcca T/G gttttaatctaaataattta | 2940 | | |
| CATP8 | 8 | intron2 + 2753 | caggaaactttcacaaagcc C/A ctaattaatttaagctccct | 2941 | | |
| CATP8 | 9 | intron2 + 3132 | tggtttaatgtaggagagtt T/C gttttaatctaaataattta | 2942 | | |
| CATP8 | 10 | intron2 + 3193 | aatgtcttgggcatatttgc A/G ttcatttggggcattcagtt | 2943 | | |
| CATP8 | 11 | intron2 + 3207 | atttgcattcatttggggca T/C tcagttctactagatacaaa | 2944 | | |
| CATP8 | 12 | exon3 + 334 | gaactggaagtattttgaca T/G ctttaccacatttcttcatg | 2945 | | |
| CATP8 | 13 | intron3 + 76 | agaattttatttttatactt G/A taagtgggcagttacctttt | 2946 | | |
| CATP8 | 14 | intron4 + 2443 | tcaatttcatgttgctctta C/T agttataggtattctaaaga | 2947 | | |
| CATP8 | 15 | intron4 + 67 | taatcacgtctataaagttt C/G tgatattctttaacaaaatt | 2948 | | |
| CATP8 | 16 | intron4 + 91 | tattctttaacaaaattgat T/A attttgtaacgacaaaagaa | 2949 | | |
| CATP8 | 17 | intron4 + 197 | ggtttgaactgcacctgttc G/A cttatatgcagcttttgtcc | 2950 | | |
| CATP8 | 18 | intron4 + 813 | tttaacagaataaaaaaaaa T/A attttgtaacgacaaaagaa | 2951 | | |
| CATP8 | 19 | intron4 + 974 | atatgcaccttaaaaataac C/G tggatttttaaatatgtaat | 2952 | | |
| CATP8 | 20 | intron4 + 1003 | taaatatgtaatgtacataa G/T gaatattatgcatattttgt | 2953 | | |
| CATP8 | 21 | intron6 + 155 | cattaataatcagaataaaa A/G agaaatttagctcctattta | 2954 | | |
| CATP8 | 22 | intron6 + 750 | atccaactggggtttagatt T/G cctctttctgcctctcctcc | 2955 | | |
| CATP8 | 23 | intron6 + 780 | gcctctcctccatctgcacc C/T tctcttttcctcagcaaaca | 2956 | | |
| CATP8 | 24 | intron6 + 1248 | ctatgccctgtaatctcaca C/T ttccctttatttaaaattgg | 2957 | | |
| CATP8 | 25 | intron6 + 1500 | tcgtgtctgtgttagcatat A/G ataactcatcagggtttgtg | 2958 | | |
| CATP8 | 26 | intron6 + 2008 | ataacataaatgagtaaaga A/G tatcaagggcaggaaattag | 2959 | | |
| CATP8 | 27 | intron6 + 2087 | actactctccccatacacac T/C aaaactcatgtgctccccag | 2960 | | |
| CATP8 | 28 | intron6 + 12305 | tcatctatggaggactgcaa T/C cattatcattatttcccaga | 2961 | | |
| CATP8 | 29 | intron7 + 363 | taacaaatgataccagccat C/G atactattctctggtaatag | 2962 | | |
| CATP8 | 30 | intron7 + 411 | cctttattttttgagaacct G/A gtggatgatattaagacgta | 2963 | | |
| CATP8 | 31 | intron7 + 428 | cctggtggatgatattaaga C/A gtatatagatcactgtaata | 2964 | | |
| CATP8 | 32 | intron7 + 634 | aaaattatatatatacatat A/G taatcttacctaagtattca | 2965 | | |
| CATP8 | 33 | intron7 + 1791 | tgtttttttaagggtagtga T/C gtgaatagtaaagcgaattt | 2966 | | |
| CATP8 | 34 | intron7 + 2000 | agttgagcaaattgctctca G/A gtagcataatgtcacttgaa | 2967 | | |
| CATP8 | 35 | intron7 + 2043 | gtttattgatccatttttta A/G tggatcaacattgtagtgag | 2968 | | |
| CATP8 | 36 | intron7 + 2171 | atttattttgagcaaaggtc G/A cgactctcttagaaagcctc | 2969 | | |
| CATP8 | 37 | intron7 + 2173 | ttattttgagcaaaggtcgc G/A actctcttagaaagcctcac | 2970 | | |
| CATP8 | 38 | intron7 + 2179 | tgagcaaaggtcgcgactct C/T ttagaaagcctcacaaatca | 2971 | | |
| CATP8 | 39 | intron7 + 2219 | atttgtaactttaagtctta T/G ataacttatatttacaaaat | 2972 | | |
| CATP8 | 40 | intron7 + 2261 | cagatattaatatatatttt A/T ttattgaaatatgttatttt | 2973 | | |
| CATP8 | 41 | intron8 + 150 | acaaaatttctccatcttgt T/C atatcatcgttgttctgcat | 2974 | | |
| CATP8 | 42 | intron8 + 154 | aatttctccatcttgtaata A/T catcgttgttctgcatttga | 2975 | | |
| CATP8 | 43 | intron8 + 1303 | ttttttttgagatggagtct T/C atatcatcgttgttctgcat | 2976 | | |
| CATP8 | 44 | intron8 + 1372 | aagctccgcctcccaggttc T/G ccacccttctcttaaagaaa | 2977 | | |
| CATP8 | 45 | exon9 + 1272 | tccttcttgtttcaacttct A/G tatttccctctaatctgcga | 2978 | | |
| CATP8 | 46 | intron10 + 63 | tcacagatttgatttaataa A/T tacttatcaaatcttcctat | 2979 | | |
| CATP8 | 47 | intron10 + 911 | cttgcccaatatcctaccaa G/T gtattattaaacggcatgga | 2980 | | |
| CATP8 | 48 | intron10 + 972 | tcctagtttccttgaagata G/A gctacaactttagtaaactt | 2981 | | |
| CATP8 | 49 | intron10 + 1101 | tccctggtcctgtgttgtcc A/T gtagtgaagacctgaaagag | 2982 | | |
| CATP8 | 50 | intron10 + 1103 | cctggtcctgtgttgtccag T/C agtgaagacctgaaagagag | 2983 | | |
| CATP8 | 51 | intron10 + 2027 | cccattttcatgagtggcta A/G gttttgtcccgtttcaaact | 2984 | | |
| CATP8 | 52 | intron10 + 2028 | ccattttcatgagtggctaa G/A ttttgtcccgtttcaaacta | 2985 | | |
| CATP8 | 53 | intron10 + 2148 | gtattttggaaagaaaatgt A/G ggtggaagagaaatatttta | 2986 | | |
| CATP8 | 54 | intron10 + 2214 | atatacagaatttcatacac T/C aatttcttaaattcctaaat | 2987 | | |
| CATP8 | 55 | intron10 + 2316 | taaatattttagtttgagac T/G tctttaaatataatggaatg | 2988 | | |
| CATP8 | 56 | intron10 + 2372 | tgtatttggcaaatgtattt G/T ttaatatttcaaaaactatt | 2989 | | |
| CATP8 | 57 | exon11 + 1557 | cagaacagaaattactcagc A/G cacttgggtgaatgcccaag | 2990 | | |
| CATP8 | 58 | intron11 + 147 | tttcttagaattattttgat A/C tttcaataacatcattaata | 2991 | | |
| CATP8 | 59 | intron11 + 10339 | aaaaaactgcattttagtgg G/C ttagctagaaaagatttgtc | 2992 | | |
| CATP8 | 60 | intron11 + 10358 | ggttagctagaaaagatttg T/G ctcatatacacaataaatta | 2993 | | |
| CATP8 | 61 | intron11 + 10538 | caacagaggatcaatgtaaa T/G gaaatctcttaaattaaaca | 2994 | | |
| CATP8 | 62 | intron12 + 55 | ataaatattaatgttaaata C/T taaagactgaatgcaattaa | 2995 | | |
| CATP8 | 63 | intron12 + 1802 | taaaatgaatcggtaaaaca T/G tcatgtataaatcactgtca | 2996 | | |
| CATP8 | 64 | intron12 + 2612 | ataggcatataatactcttt C/A ttccctctgtatatagggag | 2997 | | |
| CATP8 | 65 | exon13 + 1833 | aacagctgtggagcacaagg G/A gcttgtaggatatataattc | 2998 | | |
| CATP8 | 66 | 5′flanking − (1590-1587) | atatacataacatataccta TATC/Δ tatgttatgtgtctgcttat | 2999 | | |
| CATP8 | 67 | 5′untranslated − (11-28) | agcatcagcaacaattaaaa ATATTCACT | 3000 | | |
| | | | TGGTATCTG/Δ tagtttaataatggaccaac | | | |
| CATP8 | 68 | 5′untranslated − (4-7) | tattcacttggtatctgtag TTTA/Δ ataatggaccaacatcaaca | 3001 | | |
| CATP8 | 69 | intron4 + (213-214) | cctgttcgcttatatgcagc (T) ttttgtccaaccaaacagaa | 3002 | | |
| CATP8 | 70 | intron4 + (213-214) | cctgttcgcttatatgcagc ttttgtccaaccaaacagaa | 3003 | | |
| CATP8 | 71 | intron4 + 505 | tataactttctctttataaa G/Δ atgcaaaatgttatagcatt | 3004 | | |
| CATP8 | 72 | intron4 + 616 | aaaaataaatgaagtggagg A/Δ aaaaaaatgatttcaagttt | 3005 | | |
| CATP8 | 73 | intron4 + (804-812) | acatccatgtttaacagaat (A)9-11 tattttgtaacgacaaaaga | 3006 | | |
| CATP8 | 74 | intron4 + 855 | gagattgtttaaccaaatta G/Δ gaaactattattccaacacac | 3007 | | |
| CATP8 | 75 | intron7 + (619-628) | ttttatatatgaattaaaat (AT)4-5 catatataatcttacctaag | 3008 | | |
| CATP8 | 76 | intron7 + (1773-1779) | attttctatattatgaactg (T)7-8 aagggtagtgatgtgaatag | 3009 | | |
| CATP8 | 78 | intron8 + (1270-1290) | tagtgtgccacccttctctc (T)19-23 gagatggagtctcgctctgt | 3010 | | |
| CATP8 | 79 | intron10 + 665 | ttctttcttaactcaaaggc T/Δ tttttttttccatgtgacac | 3011 | | |
| CATP8 | 80 | intron11 + (247-250) | aaaaatcttaaggcacacac TGAT/Δ tgacagttgccttgattgta | 3012 | | |
| CATP8 | 81 | intron12 + (1622-1630) | aaataaattgttggcatcta (T)8-10 atttttctaagggtcgctgt | 3013 | | |
| CATP8 | 82 | 3′untranslated + (2464-2465) | gagaaaagcctgatgccttt A/Δ aaaaaaaatgaaacactttg | 3014 | | |
| CAT1 | 1 | 5′untranslated − 127 | gcagctcggactcagctccc G/A gagcaacccagctgcggagg | 3015 | | |
| CAT1 | 2 | 5′untranslated − 20 | gaaggcctcagcccccagcc A/G ctgggctgggcctggcccaa | 3016 | | |
| CAT1 | 3 | intron3 + 150 | caatagaacaaccttttctc G/A ggctcatgccgccctgaccc | 3017 | | |
| CAT1 | 4 | intron4 + 211 | ttctctggcttcccccactc A/C gttctccagcctgcctgctc | 3018 | | |
| CAT1 | 5 | intron5 + 33 | gagacttcccatgataacct C/T ccagggcttcacccccaaac | 3019 | | |
| CAT1 | 6 | intron6 + 168 | gaaccagatgcccccagcct C/T gactcagtcccagtctccac | 3020 | | |
| CAT1 | 7 | intron1 + (58-71) | ggaagatgggggcctttgtt (A)13-15 gtacatggagaaattaactg | 3021 | | |
| CAT1 | 8 | intron3 + (1306-1319) | aataggttgaggaggagcag (A)12-15 tcaagagtgtggagggggca | 3022 | | |
| CAT2 | 1 | intron4 + 842 | ttgacctccaaaagtgtttg G/A attacaggcatgggccattg | 3023 | | |
| CAT2 | 2 | intron5 + 33 | gtgtgtgtgagcatgcatat C/A tgtgtgtggtggggagtggg | 3024 | | |
| CAT2 | 3 | intron5 + 183 | ccacatccatcattcgagac A/C aactcgtctcagctgccatg | 3025 | | |
| CAT2 | 4 | intron5 + 184 | cacatccatcattcgagaca A/C actcgtctcagctgccatga | 3026 | | |
| CAT2 | 5 | exon7 + 1269 | actagactgctagtgtcctc C/T ggtgagcccagtcccatagg | 3027 | | |
| CAT2 | 6 | 3′untranslated + 1792 | ataaatgtgtacatgagtgt A/G tgaacacaaatacataaggt | 3028 | | |
| CAT2 | 7 | 3′flanking + 1386 | tgtagcagcccacatcgcca G/A tgttcacacctgagagagag | 3029 | | |
| CAT3 | 1 | 5′flanking − 580 | ctgtgtcagagacacagaca C/G ggaggtcctggctgccccag | 3030 | | |
| CAT3 | 2 | 5′flanking − 463 | ttcctgagaggcaaatcccc T/C tcccctactcgggaggtgcc | 3031 | | |
| CAT3 | 3 | 5′untranslated − 16 | cctgcccacagctctggctc G/A tcttgccccagtgccatgac | 3032 | | |
| CAT3 | 4 | exon2 + 153 | cctgcccacagctctggctc G/A tcttgccccagtgccatgac | 3033 | | |
| CAT3 | 5 | intron2 + 177 | gcaccaagacccttggcttc T/C tcccactcagagtccaagca | 3034 | | |
| CAT3 | 6 | intron2 + 6201 | gctcatcctctctggtcctt T/G tgccccagcacaggttcctc | 3035 | | |
| CAT3 | 7 | intron3 + 79 | tctgctccacccgtgcaccc G/C caaagaggcaaagagctggg | 3036 | | |
| CAT3 | 8 | exon5 + 723 | tggcgttggctgcagttaac T/A gtgtccattcccttcttcgt | 3037 | | |
| CAT3 | 9 | intron5 + 524 | tcgaagtacaaaggaaagtt T/C aaagagaagcctgagcctgg | 3038 | | |
| CAT3 | 10 | intron7 + 386 | gaccaatgggtttcagactc G/A aagacaaaaattatgtttat | 3039 | | |
| CAT3 | 11 | intron7 + 754 | gcccacgtcagacatgacca G/A aagacaaaaattatgtttat | 3040 | | |
| CAT3 | 12 | intron9 + 81 | attgtcctgtcctctaccca G/A tcaatcacagcactttctcc | 3041 | | |
| CAT3 | 13 | 5′flanking − (661-680) | tacatttggtccccaggggg (G) agcggctgatcaggagagaa | 3042 | | |
| CAT3 | 14 | 5′flanking − (661-680) | tacatttggtccccaggggg agcggctgatcaggagagaa | 3043 | | |
| CAT3 | 15 | intron11 + (211-212) | tctgacttggactgggcaaa AA/Δ gtatggtggtatctggacag | 3044 | | |
| ALDH1A2 | 1 | 5′flanking − 714 | aagggatcatcattctgaga C/G cgaggagagggggactcgaa | 3045 | | |
| ALDH1A2 | 2 | intron1 + 314 | cagggatcctcattctgaga G/Δ aaggcgtcgaacccgcttag | 3046 | | |
| ALDH1A2 | 3 | intron1 + (864-875) | ttttgaactgaagaacttac (T)11-12 ataacgaacgtgacgtctt | 3047 | | |
| ALDH1A2 | 4 | intron1 + 1370 | gcatgagacagaagtttttt A/G ttttatgagggtctctaacc | 3048 | | |
| ALDH1A2 | 5 | intron1 + 1667 | aatacgtgtttcagaattta A/Δ tttggtaagctcttccagttc | 3049 | | |
| ALDH1A2 | 6 | intron1 + 1934 | tcagctctttagtgagactt C/G tgaattttctaagacagcca | 3050 | | |
| ALDH1A2 | 7 | intron1 + (1971-1980) | agcacagtgcacaagcagtc (T)6-11 aaaacgtgaagagcagaagct | 3051 | | |
| ALDH1A2 | 8 | intron1 + 2285 | tactgcaacgcagggggtta T/C tgttttttgtcttgctaaac | 3052 | | |
| ALDH1A2 | 9 | intron1 + 2287 | agcacagtgcacaagcagtc C/T tacttaaaataaatgaccac | 3053 | | |
| ALDH1A2 | 10 | intron1 + 2641 | aggactgtgctttttcaaac T/Δ agatggtgctagtcaaaggag | 3054 | | |
| ALDH1A2 | 11 | intron1 + 3035 | gacttttataattttgcata A/G ctgatattataggaatacac | 3055 | | |
| ALDH1A2 | 12 | intron1 + 3319 | aaagagttatgttttttttt T/Δ atgcatctgatatttatatgg | 3056 | | |
| ALDH1A2 | 13 | intron1 + 3474 | tgtctttttattttattcat T/C taaacttctgttttataacg | 3057 | | |
| ALDH1A2 | 14 | intron1 + 4126 | ccttccaacccatttactta G/C attgtcgttttggtcactaa | 3058 | | |
| ALDH1A2 | 15 | intron1 + 4227 | cataaattgtcagtcaaact A/G catgttaatagaccacttca | 3059 | | |
| ALDH1A2 | 16 | intron1 + 4254 | cggacttcaggttttttttt T/Δ aaatacttttttcataactat | 3060 | | |
| ALDH1A2 | 17 | intron1 + 4357 | tccttccactagatgggcct A/G tggtaccatgtggaattata | 3061 | | |
| ALDH1A2 | 18 | intron1 + 5323 | taatccaggttgcaaataga T/C gtatctggtattttaagtag | 3062 | | |
| ALDH1A2 | 19 | intron1 + 8206 | ttttgacaaacctcctagca T/G ttctttaatttctctgttga | 3063 | | |
| ALDH1A2 | 20 | intron1 + 9565 | agataaactgatgaataatt C/T actctgtgctgctgatagct | 3064 | | |
| ALDH1A2 | 21 | intron1 + (6831-9639) | taaaaacggaatgctgaaaga (AAGA) ccttttttgaattaactact | 3065 | | |
| ALDH1A2 | 21 | intron1 + (6831-9639) | taaaaacggaatgctgaaaga ccttttttgaattaactact | 3066 | | |
| ALDH1A2 | 22 | intron1 + 12731 | atgaaatagaaagggtgagg T/A gtaccttggagagaagtgat | 3067 | | |
| ALDH1A2 | 23 | intron1 + 13642 | cagtgtcataaagatacacc G/A gagatcaaaatgtttcatat | 3068 | | |
| ALDH1A2 | 24 | intron1 + (14173-14176) | tctaaaaaataaataaata AAAA/Δ gagaaagttaagtttaagat | 3069 | | |
| ALDH1A2 | 25 | intron1 + 14538 | actcatttattggttcaaag gcgaaagttaagtttaagat | 3070 | | |
| ALDH1A2 | 26 | intron1 + 14685 | ttggatcaaagccttcttaa A/G ccttaggatatgtattgagg | 3071 | | |
| ALDH1A2 | 27 | intron1 + 14711 | gttgagacattaacttacta A/G tttaaatgaagatgctagtt | 3072 | | |
| ALDH1A2 | 28 | intron1 + (15227-15337) | gaagagcacagtagaaagcc (T)6-11 aaggctagcactactattga | 3073 | | |
| ALDH1A2 | 29 | intron1 + 17236 | atcagtaccatgtgttggga A/G tacaacaattaacttaaagt | 3074 | | |
| ALDH1A2 | 30 | intron1 + 18277 | taatacaactcatttgaagg A/G tttagtcttaaaaaaacgaa | 3075 | | |
| ALDH1A2 | 31 | intron1 + 18734 | ctttgagaccctactggatc T/A taagtgatgtgagatgtggg | 3076 | | |
| ALDH1A2 | 32 | intron1 + 19021 | ttaatcacctaaatgtttaa C/T gaataagttgattttttcta | 3077 | | |
| ALDH1A2 | 33 | intron1 + 21634 | aatcaggatatgggggtttc G/A ttctttattctgccaaaaat | 3078 | | |
| ALDH1A2 | 34 | intron1 + 21730 | catttaaagtagtgatttta A/G taggagttggctgttacagt | 3079 | | |
| ALDH1A2 | 35 | intron1 + 21566 | taggataggtttcaaatgtg C/T tgttgtaggactcttttcca | 3080 | | |
| ALDH1A2 | 36 | intron1 + 26782 | aaaagaagaagaaaaaaaaa A/Δ atggtatgagacttggtagg | 3081 | | |
| ALDH1A2 | 37 | intron1 + 27885 | ggatgatcctacccaaggga T/C tggcactttccagacagtat | 3082 | | |
| ALDH1A2 | 38 | intron1 + 28204 | gcactcaatgttttaactgt C/G cttctaattgtgtggttaaa | 3083 | | |
| ALDH1A2 | 39 | intron1 + 28521 | tctttgttacaattcctaag T/C aggggtatcagataatcctc | 3084 | | |
| ALDH1A2 | 40 | intron1 + 43476 | gaataggaggatacggtcaa G/T taacagagataaaaacctgc | 3085 | | |
| ALDH1A2 | 41 | intron1 + 49334 | gaatctggattctctcatgt G/T agaaatttcactatactgct | 3086 | | |
| ALDH1A2 | 42 | intron1 + 50361 | gagtgactggttcataagtc C/T gtaacaattggtagttaact | 3087 | | |
| ALDH1A2 | 43 | intron1 + 51181 | gtaaaaggaatccttaagaa C/T aactgtcaatctgtgagcca | 3088 | | |
| ALDH1A2 | 44 | intron3 + 654 | ttaacctctcttgagtaaaa G/A gaatacttgagaactcactg | 3089 | | |
| ALDH1A2 | 45 | intron3 + 664 | gtaaaaggaatcattaggaa C/T cagaggcgatggtaaggaat | 3090 | | |
| ALDH1A2 | 46 | intron3 + 712 | aatagactactgctccgttt G/T aaatgtcattctgtgagcca | 3091 | | |
| ALDH1A2 | 47 | intron3 + 1273 | tattcatactatgaaaaagg T/A gtttcatggggaagaaattc | 3092 | | |
| ALDH1A2 | 48 | intron3 + 1743 | atacacctaactgagattcc C/T gttttaaacaatctcaagct | 3093 | | |
| ALDH1A2 | 49 | intron3 + 2591 | tgcagatatataatcattgt A/G gttttactaggaactaggac | 3094 | | |
| ALDH1A2 | 50 | intron3 + 2819 | ctaggaaatagacaaaaatg G/A cagtactagaaatcttttta | 3095 | | |
| ALDH1A2 | 51 | intron3 + 220 | aattgtgctagattaggtgc T/C ggggtacgtatgaagggaca | 3096 | | |
| ALDH1A2 | 52 | intron3 + 280 | cggcttactcctcctgaaca T/C ataagatatactgtttggaa | 3097 | | |
| ALDH1A2 | 53 | intron3 + 461 | cataatggctggttttcagt G/T tctttttatatttcctatgg | 3098 | | |
| ALDH1A2 | 54 | intron4 + 506 | tctacatttctcgaacggcc G/A tgaattacttactaatctgg | 3099 | | |
| ALDH1A2 | 55 | intron4 + 1952 | ttggtccctactccacctgt C/G atttcattattaaaacaaca | 3100 | | |
| ALDH1A2 | 56 | intron4 + 2078 | ctgtgtggcgtggcggtcgg C/T ctcagttttcttttacttcc | 3101 | | |
| ALDH1A2 | 57 | intron4 + 2589 | ttgcgtcagaaacctctctc C/G ggtggtgtctcaaacagatg | 3102 | | |
| ALDH1A2 | 58 | intron4 + (2840-2851) | tttgtatgtgcatagttggc (T)11-13 cacagtgaagtctggagtat | 3103 | | |
| ALDH1A2 | 59 | intron4 + 7231 | aataggatacaaatacacaa A/T gatagtgattcagatcctaa | 3104 | | |
| ALDH1A2 | 60 | intron4 + 7958 | taaaatcgtttttattgtta C/T taggtatataaaatttgcta | 3105 | | |
| ALDH1A2 | 61 | intron4 + 8090 | tctgattttatcactgttta C/T agattgcttagtcatactca | 3106 | | |
| ALDH1A2 | 62 | intron4 + 12823 | tgttagcctgtagctaaatg C/T ttttcaaatatgtgaacggt | 3107 | | |
| ALDH1A2 | 63 | intron4 + 12939 | atgaggtccgacttttaaga T/C ttttgtctacattttcttcc | 3108 | | |
| ALDH1A2 | 64 | intron4 + 14935 | tattgatggagttcttttta T/G aaatggacttttaccttctt | 3109 | | |
| ALDH1A2 | 65 | intron4 + 15321 | gcatttgggtgtctgagaga C/T atatccagaaatatgctatg | 3110 | | |
| ALDH1A2 | 66 | intron4 + 15412 | tttcaagtttatttctgttt T/G aaatggacttttaccttctt | 3111 | | |
| ALDH1A2 | 67 | intron5 + 1888 | aatccaaacatctgtacttt G/T tagtggacaagatttatgtc | 3112 | | |
| ALDH1A2 | 68 | intron7 + 9166 | gaaaagctactttattcaaa G/A ataaaagtattttaagaaaa | 3113 | | |
| ALDH1A2 | 69 | intron7 + 9914 | aagctggagaaaatactagg C/T tttcctcaacagtgatttcc | 3114 | | |
| ALDH1A2 | 70 | intron7 + 18942 | tttggaggggaactaatccc G/A tgacttctaggttatctctt | 3115 | | |
| ALDH1A2 | 71 | intron7 + 19820 | ttcacccctcattttaggtt A/G ggggaggtggcttgctacag | 3116 | | |
| ALDH1A2 | 72 | intron7 + 19826 | cctcattttaggttagggga G/A gtggcttgctacagttttag | 3117 | | |
| ALDH1A2 | 73 | intron7 + 19913 | cgtgaatcattcagtatttt A/G tttaaaaataccagtttgaa | 3118 | | |
| ALDH1A2 | 74 | intron7 + (20110-20111) | catgatttattctctaacta (ACTA) tgctaagtcaaagattctgc | 3119 | | |
| ALDH1A2 | 74 | intron7 + (20110-20111) | catgatttattctctaacta tgctaagtcaaagattctgc | 3120 | | |
| ALDH1A2 | 75 | intron7 + 21857 | acaatgaaaattaagaaagg A/T gaagagggaagaagcagaga | 3121 | | |
| ALDH1A2 | 76 | intron7 + 21929 | tacaagacacaggcatcttt A/G actagtttactgggatctct | 3122 | | |
| ALDH1A2 | 77 | intron7 + 23308 | ggctttgacttcggaaacct G/T tgggttataacaaagtactg | 3123 | | |
| ALDH1A2 | 78 | intron7 + 23554 | gacattggtgaaaaccaggg C/T tgtttaggagtgtcctgtcc | 3124 | | |
| ALDH1A2 | 79 | intron7 + (23701-23703) | catctgagatttgccttgtg GTG/Δ tttaccgagttagtgggtgc | 3125 | | |
| ALDH1A2 | 80 | intron7 + 26479 | gatacatgaacaatttgttt T/C atcctcatgatatctttcaa | 3126 | | |
| ALDH1A2 | 81 | intron7 + 26561 | taaaggccacaatgcagtga T/C tgaaatctccagttacattt | 3127 | | |
| ALDH1A2 | 82 | intron7 + 26662 | tttccttagtccttccatca C/T gaaactaaagctgtcttcca | 3128 | | |
| ALDH1A2 | 83 | intron8 + 76 | tttatatctccacttttgat G/A ggacactagcaaaagatatt | 3129 | | |
| ALDH1A2 | 84 | intron8 + (700-711) | accatctcattcagtgattc (T)11-12 ccctccacttgttgccaggc | 3130 | | |
| ALDH1A2 | 85 | intron8 + 724 | ttttttttccctccacttgt T/C gccaggcagagctgctttcc | 3131 | | |
| ALDH1A2 | 86 | intron8 + 800 | cagattgcttgaatttcagc C/A ccagcttggaatttgcagag | 3132 | | |
| ALDH1A2 | 87 | intron8 + 1251 | gatttctgtgaaaattgaga G/A gatctggcaacctggggctc | 3133 | | |
| ALDH1A2 | 88 | intron8 + 1627 | ggcccctccccaggcaaagc G/A gtgagaacatggctgtttcc | 3134 | | |
| ALDH1A2 | 89 | intron9 + 141 | tggagcgggccaagaggcgc G/A tagtggggagtccctttgac | 3135 | | |
| ALDH1A2 | 90 | intron9 + 778 | aaccagtctggacagatccc T/C tgtagcttgtgaaagtgtag | 3136 | | |
| ALDH1A2 | 91 | intron9 + 801 | tagcttgtgaaagtgtagga A/G gtgaagggctggctcacttc | 3137 | | |
| ALDH1A2 | 92 | intron9 + 868 | tctgaaggcctcgtgtactt T/C agtggggtggggagggccac | 3138 | | |
| ALDH1A2 | 93 | intron9 + 1338 | aatttttgcctctttttact A/G tcaatacaacttgctaagtt | 3139 | | |
| ALDH1A2 | 94 | intron10 + (227-229) | ctatgtgcttatgattatta TTA/Δ gccaacagaacaatcagaat | 3140 | | |
| ALDH1A2 | 95 | intron10 + 316 | ctaaatgtgggtcactggga T/C gttaaccaggagagagaatc | 3141 | | |
| ALDH1A2 | 96 | intron10 + 368 | ctttacatctgtgcaagaga G/A ggacaaggagcaaatcagcc | 3142 | | |
| ALDH1A2 | 97 | intron10 + 660 | gtaaacttgcattgaaatgt G/A gaaagcaggtaaaggaatga | 3143 | | |
| ALDH1A2 | 98 | intron11 + 104 | tggggaataccaaaagcaac C/T aaagttcaccagaaaagggg | 3144 | | |
| ALDH1A2 | 99 | intron11 + 229 | aaacttctaaaagaaatacc A/G tgccagtcagattatgtgct | 3145 | | |
| ALDH1A2 | 100 | intron12 + 117 | catacattcaccaaacattt C/T gtggagcacatgctactata | 3146 | | |
| ALDH1A2 | 101 | intron12 + 691 | gatagggaagatcactgtga A/G ctggaaaaatctgggaaacc | 3147 | | |
| ALDH1A2 | 102 | intron12 + 1934 | catcttgtctagattgcatg T/C ttgtttgtttgtttgtctct | 3148 | | |
| ALDH1A2 | 103 | intron12 + 1973 | ctacttacccccaaaacatg T/A tttctctttcttaaatgacc | 3149 | | |
| ALDH1A2 | 104 | intron12 + 2722 | ccagagtgactccagtatac C/A tcactgcccaggacccacag | 3150 | | |
| ALDH1A2 | 105 | intron12 + 3855 | cacttgaaagcaaccataat T/C gtgaggtttctgatgctgta | 3151 | | |
| ALDH1A2 | 106 | intron12 + 4185 | ttgctttaagcgaaatgaac T/C atacggacaggagaacagcc | 3152 | | |
| ALDH1A2 | 107 | intron12 + 4991 | acaggaacacttagacatgc A/G acccactcccaccctccgtc | 3153 | | |
| ALDH1A2 | 108 | intron12 + (5018-5019) | cccaccctccgtcttggggg (G) aggaaagcacactactgtcc | 3154 | | |
| ALDH1A2 | 108 | intron12 + (5018-5019) | cccaccctccgtcttggggg aggaaagcacactactgtcc | 3155 | | |
| ALDH1A2 | 109 | intron12 + (5051-5052) | actgtcccaaagaactaata (A) ctgaaccagtgctgccttgt | 3156 | | |
| ALDH1A2 | 109 | intron12 + (5051-5052) | actgtcccaaagaactaata ctgaaccagtgctgccttgt | 3157 | | |
| ALDH1A2 | 110 | intron12 + (5300-5302) | ttaaagttttaaaaaaactt CCT/Δ taaaaactactcatgagatg | 3158 | | |
| ALDH1A2 | 111 | intron12 + 5405 | catcccaggacttgctgttc G/C caggtgataaactgcacctc | 3159 | | |
| ALDH1A2 | 112 | intron12 + 5435 | aactgcacctccccaggact C/A ccgctgcactcacatgcagc | 3160 | | |
| ALDH1A2 | 113 | 3′flanking + 449 | tttgggccgggaacaatttt T/C caaggttgtaaagccaaatt | 3161 | | |
| ALDH1A2 | 114 | 3′flanking + 597 | acctgggatattcctgaccc A/C atctggttttcttttaccca | 3162 | | |
| ALDH1A2 | 115 | 3′flanking + 669 | atagagactggaagtcatca T/C gtgcagttcaccgcttctga | 3163 | | |
| ALDH1A2 | 116 | 3′flanking + 1122 | cgtgctccactgagctcctc T/G gtcacaccccattcttgccc | 3164 | | |
| ALDH1A2 | 117 | 3′flanking + 2214 | tgcagctgtaaaaagaaatc T/C gtaaatggtgaccgtactac | 3165 | | |
| ALDH1A3 | 1 | 5′flanking − 1425 | cagtgttagccagccgatat C/T ggtcaaggctgccccgctcg | 3166 | | |
| ALDH1A3 | 2 | 5′flanking − 1379 | ccattatcccctttccccgg C/T ctcagctgtgcactccaggc | 3167 | | |
| ALDH1A3 | 3 | 5′flanking − 1270 | aacttacccctctatccagc T/A ctatccagaaggacaccagg | 3168 | | |
| ALDH1A3 | 4 | 5′flanking − (1214-1213) | acggaggcctcaaaacagga (GGA) aaataaggagacccctcccc | 3169 | | |
| ALDH1A3 | 4 | 5′flanking − (1214-1213) | acggaggcctcaaaacagga aaataaggagacccctcccc | 3170 | | |
| ALDH1A3 | 5 | 5′flanking − 1103 | gcacagcttttgtcaggagt C/T cgtgcctccggtctttgttc | 3171 | | |
| ALDH1A3 | 6 | intron1 + 986 | gccttaactttccccacctt T/G ggcttctcttgatttttgct | 3172 | | |
| ALDH1A3 | 7 | intron1 + 1462 | gtacaggatttcaaaatact G/A caacctttgccagttaaagg | 3173 | | |
| ALDH1A3 | 8 | intron1 + 1661 | cctgttgtcttggtgggtgc G/A caacctttgccagttaaagg | 3174 | | |
| ALDH1A3 | 9 | intron1 + 2360 | agaggatagaagtcccttct A/G atttagagggcctctttctt | 3175 | | |
| ALDH1A3 | 10 | intron1 + 2516 | tgaaaacatattctttttga G/A tttagctgagtggcctgttg | 3176 | | |
| ALDH1A3 | 11 | intron1 + 2624 | cctgagacaccttacagctc C/T gtcctgcttccatgtcattc | 3177 | | |
| ALDH1A3 | 12 | intron1 + 3255 | tttcatctttctacaaatgg G/C cccctcttcctggctgcact | 3178 | | |
| ALDH1A3 | 13 | intron1 + (3643-3656) | gcttcagaggtttttgtggg (T)12-14 aacattctatcaacttttaa | 3179 | | |
| ALDH1A3 | 14 | intron1 + 4265 | ccaaaagccctctcttttaa T/C atgacattaataagacaatt | 3180 | | |
| ALDH1A3 | 15 | intron1 + 5187 | caagatggataagacgtcac C/T taaggtccttagcatgttga | 3181 | | |
| ALDH1A3 | 16 | intron2 + 43 | ctctaagtaattcaattatg G/T atgaccaaaggataaggaaa | 3182 | | |
| ALDH1A3 | 17 | intron2 + 127 | cagggcctgggctagctgcg T/C gaattggcatgtggttctca | 3183 | | |
| ALDH1A3 | 18 | intron2 + (285-300) | aggaaaggttttcttttttc (T)16-17 atcaattatttggacctgga | 3184 | | |
| ALDH1A3 | 19 | intron2 + 778 | cgtgtgcagagtaggcttgg A/G ttttatcttgcccatgagtt | 3185 | | |
| ALDH1A3 | 20 | intron2 + 1216 | actcggtagagtcactcctg A/C ctggtgtcccacatccactc | 3186 | | |
| ALDH1A3 | 21 | intron3 + 81 | accatggggtatgggaaaaa A/C gatcacggtcctggttttgt | 3187 | | |
| ALDH1A3 | 22 | intron3 + 236 | gctcagcttcttgaccaagt T/G gttgtctataggcagttgag | 3188 | | |
| ALDH1A3 | 23 | intron3 + 1467 | ggcccggttgtaggggagga G/T atctcctttctggcctttga | 3189 | | |
| ALDH1A3 | 24 | intron3 + 1725 | ccacatgttccccgggtgag A/G gtagctccctcccagggtaa | 3190 | | |
| ALDH1A3 | 25 | intron3 + 3777 | gccagaagtagatgccccca A/G ttcagctgctgcattactgg | 3191 | | |
| ALDH1A3 | 26 | intron3 + 3829 | caagtcactgggccgttagc G/C tccgtgcctgcaccttgaag | 3192 | | |
| ALDH1A3 | 27 | intron3 + 4299 | tcactttccacagccacact G/A gccagcctggccgagaagga | 3193 | | |
| ALDH1A3 | 28 | intron4 + 84 | agagccccccctgactgttt C/G cctaaggcaccattcccaac | 3194 | | |
| ALDH1A3 | 29 | intron4 + 126 | ccactccctctccaaatggt A/G ctgccaattcttcttctaag | 3195 | | |
| ALDH1A3 | 30 | intron6 + (290-291) | tagagaattttcaggggggg (G) tcaaccaagagggagccaaa | 3196 | | |
| ALDH1A3 | 30 | intron6 + (290-291) | tagagaattttcaggggggg tcaaccaagagggagccaaa | 3197 | | |
| ALDH1A3 | 31 | intron6 + 705 | aacagctggtgatgagccaa T/G tttccactttcctttggtga | 3198 | | |
| ALDH1A3 | 32 | intron7 + 56 | ggggcgtgttatttgacacc C/T gtgagcttttcctttgacag | 3199 | | |
| ALDH1A3 | 33 | intron7 + 1107 | gatgctgttactctccttgg A/G gacagacactgccctgtgga | 3200 | | |
| ALDH1A3 | 34 | intron7 + 1610 | aagagccacacagaaccacc C/G ccctactgggctgttggaat | 3201 | | |
| ALDH1A3 | 35 | intron8 + 1820 | cacctgtaagtggagcggct T/C agaccaaggatcccaggatg | 3202 | | |
| ALDH1A3 | 36 | intron8 + 963 | gagaaaggacaggaggagga C/T acaggctctcaggaaggaaa | 3203 | | |
| ALDH1A3 | 37 | intron8 + 1824 | accattcttatccactaagc G/A tgtcccccaagatcttattc | 3204 | | |
| ALDH1A3 | 38 | intron9 + 2384 | cgcctccctcgcccctcccc C/A tccagtggacttggcagtgg | 3205 | | |
| ALDH1A3 | 39 | intron9 + 24 | atccccctggtgtgtgtgaa A/C ccatggtgcttgtctagggg | 3206 | | |
| ALDH1A3 | 40 | intron9 + 91 | gcctacagggtccctctccg T/C gaaaggaatgctgacctgtc | 3207 | | |
| ALDH1A3 | 41 | intron9 + 219 | actgaggcatgggaggaggg C/G gctattcccagggcagaagg | 3208 | | |
| ALDH1A3 | 42 | intron9 + 495 | ccagacggagagagcctggg G/A caggagaatgtatctccagg | 3209 | | |
| ALDH1A3 | 43 | intron9 + 1472 | ttgacttttgaggccagata C/T accgatttcttccaagagaa | 3210 | | |
| ALDH1A3 | 44 | intron9 + 2038 | taaacaatgtgttcctacgg G/A ctctccagggagtgtggagt | 3211 | | |
| ALDH1A3 | 45 | intron9 + 2124 | caaacagggtctgccagatg G/A catatgcccagcagccaggg | 3212 | | |
| ALDH1A3 | 46 | intron9 + 2154 | agcagccagggaggacctgc G/C gttgggcgaagcccctgtgt | 3213 | | |
| ALDH1A3 | 47 | intron9 + 2197 | cttttggcccctcagggagg G/A gaagagcagctcagcagcat | 3214 | | |
| ALDH1A3 | 48 | intron9 + 2466 | ttcttagttcctcatgtttc C/T ctctagaatgttttcgtgtg | 3215 | | |
| ALDH1A3 | 49 | intron9 + 3655 | gattggtcaagtggcatgca C/T ggtttatgccctctctcctg | 3216 | | |
| ALDH1A3 | 50 | intron9 + 3954 | gggtgcgcttttgacaactg C/G tcagtagcgtgttcacaagc | 3217 | | |
| ALDH1A3 | 51 | exon10 + 88 | tggaatgcgggggctcagcc A/G tggaagacaaggggctcttc | 3218 | | |
| ALDH1A3 | 52 | intron10 + 8 | tgccaaagaggaggtacaag G/A gggctgtggcaaggctacga | 3219 | | |
| ALDH1A3 | 53 | intron10 + 307 | ctctctgattttctaacaca A/C ccggtccccgagtcagtcat | 3220 | | |
| ALDH1A3 | 54 | intron10 + 378 | gtgggttttgccaggaatca G/A ttcaagaacctgtggattca | 3221 | | |
| ALDH1A3 | 55 | intron10 + 975 | aatattgtgtcattccttcc C/G ctggtagttattatggaaac | 3222 | | |
| ALDH1A3 | 56 | intron10 + 1088 | cagtgccaggagccaggggg C/T cttctccagatgactctgag | 3223 | | |
| ALDH1A3 | 57 | intron11 + 105 | ttgtttacattgtatattat A/G taccaagccctgtctcagtg | 3224 | | |
| ALDH1A3 | 58 | intron11 + 274 | agggctccagtacctgtgcc T/G gtggcccctgtgctgtactg | 3225 | | |
| ALDH1A3 | 59 | intron11 + 1088 | cagtgccaggagccaggggg T/A cttctccagatgactctgag | 3226 | | |
| ALDH1A3 | 60 | intron12 + 96 | ctccaatctgctgacacccc G/A tccccccccacaccgcgctc | 3227 | | |
| ALDH1A3 | 61 | intron12 + 5642 | tctgtgctaacgtctgcttc T/C ctcatgccccctaggctggc | 3228 | | |
| ALDH1A3 | 62 | exon13 + 104 | gggctccttcctcaaacatc G/C gacggcggaatgtggcagat | 3229 | | |
| ALDH1A3 | 63 | exon13 + 281 | ataggttgtctgtgaaatcg C/T agtcctgcctggggagggag | 3230 | | |
| ALDH1A3 | 64 | 3′flanking + 743 | gtgagcaggaaactgtagga G/A aaggatattttccctcattt | 3231 | | |
| ALDH1A3 | 65 | 3′flanking + 1145 | gcctcccagctaccccaccc A/G cctcaggaggggtcattcca | 3232 | | |
| ALDH1A3 | 66 | 3′flanking + 1185 | aacctagggtgctgagaatc T/C gggtgggattaccagcaaaa | 3233 | | |
| ALDH1A3 | 67 | 3′flanking + 1600 | acaccacgccctgcaaattg T/C tgggaacttgtcggtggcaa | 3234 | | |
| ALDH1A3 | 68 | 3′flanking + 1847 | caggagccctgcggctgccc C/G ggttctgtgaaatggcagtg | 3235 | | |
| ALDH1L1 | 1 | intron1 + 252 | cgcagcgccaggactggccc G/C ccgaggatctggccggccgc | 3236 | | |
| ALDH1L1 | 2 | intron1 + 544 | ctcaggggctgcgctggagt C/T ccagctccagccactgcgct | 3237 | | |
| ALDH1L1 | 3 | intron1 + 6596 | cagatttttcttaaggtgca C/G tagccactgaggatattttt | 3238 | | |
| ALDH1L1 | 4 | intron1 + 6513 | caattatggtttatcttagg G/A acatgtttatagagatagta | 3239 | | |
| ALDH1L1 | 5 | intron1 + 6478 | atagtattcttacttagctt G/A cattctaaattttgttccct | 3240 | | |
| ALDH1L1 | 6 | intron2 + 240 | gtggcattagggtcctggag A/G agggctatagagaagcccag | 3241 | | |
| ALDH1L1 | 7 | intron2 + 1326 | gaggaggagaccggagagga G/C agccagtccagtcagggccc | 3242 | | |
| ALDH1L1 | 8 | intron3 + 386 | gtcctactctaacttccact G/A ccgctgctctgggcagcaca | 3243 | | |
| ALDH1L1 | 9 | intron4 + 271 | gggcccgttcaatagacaag G/C aaggctaaaggcagggactg | 3244 | | |
| ALDH1L1 | 10 | intron4 + 356 | taggattctatttctctctc C/T ttcactcgttgattctcctt | 3245 | | |
| ALDH1L1 | 11 | intron4 + 608 | gtgctctgataggctgtctc A/C gtcacatgcttcctgctggg | 3246 | | |
| ALDH1L1 | 12 | intron4 + 664 | ggtcacatggcctgagcggc A/G gggcggctcagtcacctggg | 3247 | | |
| ALDH1L1 | 13 | intron4 + 785 | gagggctgcttgcccctgcc C/G gaggacaggctggcagggac | 3248 | | |
| ALDH1L1 | 14 | intron4 + 874 | ccctggggagcccttgctgt T/G tgggcgcagcaggaagagca | 3249 | | |
| ALDH1L1 | 15 | intron4 + 1349 | tccctcaggctcttgctcac G/A tgggcccagactccttggct | 3250 | | |
| ALDH1L1 | 16 | intron4 + 1799 | ctggggctgggaaggaggca G/A ggtcctattgctggggatag | 3251 | | |
| ALDH1L1 | 17 | intron4 + 1815 | ggcagggtcctattgctggg G/A atagcaaccaactggatctc | 3252 | | |
| ALDH1L1 | 18 | intron5 + 272 | aaagcccacagggagataag A/G gtgggagttagggggcaaaa | 3253 | | |
| ALDH1L1 | 19 | intron5 + 301 | tagggggcaaaacgtcagcc G/A tagtgcgagcagtcttcaag | 3254 | | |
| ALDH1L1 | 20 | intron5 + 343 | caaggtgtgagggacagtgc G/A ggtctctggagcaatagcca | 3255 | | |
| ALDH1L1 | 21 | intron6 + 926 | cctgcctgggctactggctt C/T gggggcttcttctcacccac | 3256 | | |
| ALDH1L1 | 22 | exon7 + 41 | aacgctgaacacttcaggcc T/C ggtgcccgagggagacgctt | 3257 | | |
| ALDH1L1 | 23 | intron7 + 305 | cctagaatcagagagaagcc C/T tcccagggagcctgggttca | 3258 | | |
| ALDH1L1 | 24 | intron7 + 837 | gtccggacaaaccccatggg C/T gtggtacccccagccgtgtt | 3259 | | |
| ALDH1L1 | 25 | intron7 + 866 | cccagccgtgttgctgtgtc C/T ggcctaccagagtgaggcgt | 3260 | | |
| ALDH1L1 | 26 | intron7 + 884 | tccggcctaccagagtgagg C/T gtggcagtatggggcctggc | 3261 | | |
| ALDH1L1 | 27 | intron7 + 1118 | aatgttccagaaaatcatgc G/C aggcagtaagggcagaggaa | 3262 | | |
| ALDH1L1 | 28 | intron7 + 1168 | aaagtaaaggttcaggagaa G/A tctagcctggggctgctccc | 3263 | | |
| ALDH1L1 | 29 | intron7 + 1451 | cagggcacccacagcatctg T/C taagtgtcttaagaggaagc | 3264 | | |
| ALDH1L1 | 30 | intron7 + 1489 | caggaatgcaaagaaggcaa T/C taagtgtcttaagaggaagc | 3265 | | |
| ALDH1L1 | 31 | intron7 + 1579 | tcagggtgggaggggagtga G/A gagagaccagctgagcacac | 3266 | | |
| ALDH1L1 | 32 | intron7 + 1691 | ctggctgggctttagcttgc A/C gaaagctccagaacatcttt | 3267 | | |
| ALDH1L1 | 33 | intron8 + 2627 | aaagaggagagccgggggtg C/T ttgtgccaggggttggggga | 3268 | | |
| ALDH1L1 | 34 | intron8 + 2646 | gcttgtgccaggggttgggg G/A aactggttctgattgggcct | 3269 | | |
| ALDH1L1 | 35 | intron8 + 2925 | ctgctgccctccataggtcc C/G agactgaatccttcagagga | 3270 | | |
| ALDH1L1 | 36 | exon9 + 4 | caggtcttgctttgcagagt G/T tttggcagcggatcctcccc | 3271 | | |
| ALDH1L1 | 37 | exon10 + 109 | cagctgttagtgaggaagct G/T cgaggggacgatgaggaggg | 3272 | | |
| ALDH1L1 | 38 | intron10 + (671-672) | tggcattttcctctgtctga (AG) gtcctcttagcccaccctaa | 3273 | | |
| ALDH1L1 | 38 | intron10 + (671-672) | tggcattttcctctgtctga gtcctcttagcccaccctaa | 3274 | | |
| ALDH1L1 | 39 | intron11 + 8 | caccgatggaagtgtgagtg C/A aggcccagcaccccttctcc | 3275 | | |
| ALDH1L1 | 40 | intron11 + 447 | atgagccaaagcacgcctat G/A gtagatacacacgtgaacat | 3276 | | |
| ALDH1L1 | 41 | intron11 + 601 | ctcaaagtgagtcatttgag A/G ggagttaatgaaagactcat | 3277 | | |
| ALDH1L1 | 42 | intron11 + 639 | catctgcaaagggagaggga G/A ggggtagggacacagacagg | 3278 | | |
| ALDH1L1 | 43 | intron12 + 684 | tcctgggagaagagagggtg C/T ggccagatgagccgagaaca | 3279 | | |
| ALDH1L1 | 44 | intron12 + 767 | cgtctaggggtgcgaagcca A/G gttatggcgtggtcccaacg | 3280 | | |
| ALDH1L1 | 45 | intron12 + 1014 | tcataggttccagtcccctt C/T gcaagcccctcaattctaga | 3281 | | |
| ALDH1L1 | 46 | intron12 + 1359 | ctggttctgcctcagctcag C/T acagcagaggctgggtctag | 3282 | | |
| ALDH1L1 | 47 | intron12 + 1734 | ggtggtccaggctgctggtg G/T tcagtagggccggccgagcc | 3283 | | |
| ALDH1L1 | 48 | intron12 + 1901 | ttcagcagcctaactgaatt G/A acaatagaatagtcctgcaa | 3284 | | |
| ALDH1L1 | 49 | intron12 − 470 | gggatggggccacctctcca T/C ctctggagatgccaggctca | 3285 | | |
| ALDH1L1 | 50 | intron12 − 334 | aagggcagcctcttgggcca T/C gacccctttgctgtctgcag | 3286 | | |
| ALDH1L1 | 51 | intron12 − 325 | ctcttgggccatgacccctt T/C gctgtctgcagcaagtgggt | 3287 | | |
| ALDH1L1 | 52 | intron12 − 221 | gaaggaagcgagggaagatc G/C aggaaaggagagagggacag | 3288 | | |
| ALDH1L1 | 53 | intron12 − 4 | cccgcttcccctcaccctgg T/C caggttggcagatctcatgg | 3289 | | |
| ALDH1L1 | 54 | intron13 + 34 | tcccacccagtgtgagcaca T/C gcagactggcccagccatat | 3290 | | |
| ALDH1L1 | 55 | intron13 + 58 | gactggcccagccatatagg A/G gaactccaagggcagcacag | 3291 | | |
| ALDH1L1 | 56 | intron13 + 125 | ccacaactggtggcttggaa T/C gacacctgtttattagcttg | 3292 | | |
| ALDH1L1 | 57 | intron13 + 126 | cacaactggtggcttggaat G/A acacctgtttattagcttgt | 3293 | | |
| ALDH1L1 | 58 | intron13 + 281 | acctgcatccagacgagttc T/G ggtgttgacagagttcagtt | 3294 | | |
| ALDH1L1 | 59 | intron13 + 299 | tcgggtgttgacagagttca A/G ttccgtgtggatgcagggct | 3295 | | |
| ALDH1L1 | 60 | intron14 + 121 | catttatcaaacagccatcc A/G tgtgcttcttgagcacctgc | 3296 | | |
| ALDH1L1 | 61 | intron14 + 157 | gccaggcattgttgtaagga C/T ttgaggacaattgtatttaa | 3297 | | |
| ALDH1L1 | 62 | intron14 + 206 | taatctcccagtaacactgg A/C tcagtcaggtccacggtggg | 3298 | | |
| ALDH1L1 | 63 | intron14 + 219 | cactggatcagtcaggtcca C/G ggtgggaaacaagagtaaac | 3299 | | |
| ALDH1L1 | 64 | intron14 + 2275 | tctcatctgtgatgcatccg T/C cagacctctgctcccagcct | 3300 | | |
| ALDH1L1 | 65 | intron14 + 2431 | agaatgactgagtgatcaga C/G ctagagagccccagccccgg | 3301 | | |
| ALDH1L1 | 66 | intron14 + 2660 | agccaagcatttcttgggga C/T accaagaaaccttgcttggt | 3302 | | |
| ALDH1L1 | 67 | intron14 + 2740 | aactccaccctcaccgtcca T/C gcagctccccaggagcgtca | 3303 | | |
| ALDH1L1 | 68 | intron14 + 2756 | tccatgcagctccccaggag T/C gtcagagggcagaggagggg | 3304 | | |
| ALDH1L1 | 69 | intron14 + 2805 | ccgcacagcaggagaatggc T/C ccaagggagggagggacggg | 3305 | | |
| ALDH1L1 | 70 | intron14 + (3636-3637) | tctcctgggtgtgtgtgggg (G) tgtggggcagctcccctatc | 3306 | | |
| ALDH1L1 | 70 | intron14 + (3636-3637) | tctcctgggtgtgtgtgggg tgtggggcagctcccctatc | 3307 | | |
| ALDH1L1 | 71 | intron14 + 4347 | tccaggacagaaacagcagg C/T gtgagctgcctctcagaggg | 3308 | | |
| ALDH1L1 | 72 | intron15 + 380 | atgtcccttatgtggcttcc A/G agaccagaagtcctggagag | 3309 | | |
| ALDH1L1 | 73 | intron15 + (1055-1056) | gccacaatctgcagctactc (C) tcccagcttgctgctgggct | 3310 | | |
| ALDH1L1 | 73 | intron15 + (1055-1056) | gccacaatctgcagctactc tcccagcttgctgctgggct | 3311 | | |
| ALDH1L1 | 74 | intron17 + 15 | gaaaaggtgcgtggctgggg G/C tggagcagaggaggggctgc | 3312 | | |
| ALDH1L1 | 75 | intron17 + 44 | aggaggggctgctgtgagtg C/T gcctgggacatggcagtgct | 3313 | | |
| ALDH1L1 | 76 | intron17 + 51 | gctgctgtgagtgcgcctgg G/A acatggcagtgctgtccaca | 3314 | | |
| ALDH1L1 | 77 | intron17 + (2224-2223) | ctggtgtcatctcccagact CT/Δ gtcactaaaccacaatatga | 3315 | | |
| ALDH1L1 | 78 | intron18 + 140 | agcgtcatcacaagcatagc G/A tggcaggcagcaggcttagg | 3316 | | |
| ALDH1L1 | 79 | intron19 + (51-52) | tggttcactgggacagcagc GC/Δ ctggctggagggggttggag | 3317 | | |
| ALDH1L1 | 80 | intron19 + 399 | tcaggtcagcctgggcctga C/A catggacaggggccctggag | 3318 | | |
| ALDH1L1 | 81 | intron19 + 1794 | gtcctgtctgggggtcttaa G/C ggagtcatgagacttccaca | 3319 | | |
| ALDH1L1 | 82 | intron19 + 1969 | tgatcggggtgcggtttggg G/T cgacaggacaggagcagaga | 3320 | | |
| ALDH1L1 | 83 | intron19 + 1972 | tcggggtgcggtttggggcg A/G caggacaggagcagagaata | 3321 | | |
| ALDH1L1 | 84 | intron19 + 2083 | tgagaagagcagaggggtgt G/T ccgggtgctcgagtcacacc | 3322 | | |
| ALDH1L1 | 85 | intron19 + 2119 | acacctgtgtctgattaggg C/T tgattaggggtgcagagttt | 3323 | | |
| ALDH1L1 | 86 | intron20 + 1388 | ttaccctcttcccactcccg C/T tggactgtgagttccatgag | 3324 | | |
| ALDH1L1 | 87 | intron20 + 1564 | cccaggaaccaggaacagtg G/A ggagccatcaccccgccctg | 3325 | | |
| ALDH1L1 | 88 | intron20 + 1873 | tcagtgttaaaacatcattt G/A tgtatgtatgaaaaatattg | 3326 | | |
| ALDH1L1 | 89 | intron20 + 2427 | actaggattggatggacttg G/C gatcaggtctcagctctgtc | 3327 | | |
| ALDH1L1 | 90 | intron20 + 2458 | cagctctgtcacctgccaac C/T ggcggccccatttccctcaa | 3328 | | |
| ALDH1L1 | 91 | intron20 + 2544 | ccaggtgggagagccatctg C/T agcgtggtgacacccatcac | 3329 | | |
| ALDH1L1 | 92 | intron20 + 2573 | gacacccatcacacgggtgc C/T gtgacccggtgcttatgtcg | 3330 | | |
| ALDH1L1 | 93 | intron20 + 2574 | acacccatcacacgggtgcc G/A tgacccggtgcttatgtcgg | 3331 | | |
| ALDH1L1 | 94 | exon21 + 33 | agccaactgttttcacagac G/A tggaagaccacatgttcata | 3332 | | |
| ALDH1L1 | 95 | exon21 + 87 | ccttcgggcctgtcatgatc A/G tctctcggtttgctgatggg | 3333 | | |
| ALDH1L1 | 96 | intron21 + 323 | ccatgcattaaaccaccccc C/G acactgagtggcttggaata | 3334 | | |
| ALDH1L1 | 97 | intron21 + 361 | ataatcagagatttatttta C/G tcacggtctaggttcaatga | 3335 | | |
| ALDH1L1 | 98 | intron21 + 478 | gtcttgcgggaggcttcctc C/A gcgtggcagcctcggggttg | 3336 | | |
| ALDH1L1 | 99 | intron21 + 1086 | caacccaatcttgcccccgg C/T gctgcagcccggcacatttt | 3337 | | |
| ALDH1L1 | 100 | intron22 + 235 | gggcctggaggagacactcc A/C gccaggaggcactgggggcc | 3338 | | |
| ALDH1L1 | 101 | intron22 + 313 | atagcagggaggagttggcc G/A tgaagacccaggggcccgtg | 3339 | | |
| ALDH1L1 | 102 | intron22 + 1214 | tgggcccacttatgaatcct G/C cccgagttccctcagctccc | 3340 | | |
| ALDH1L1 | 103 | intron22 + 1226 | tgaatcctccccgagttccc T/C cagctccctcctaaccctag | 3341 | | |
| ALDH1L1 | 104 | intron22 + 1623 | ggggcttcccactgtccaga C/G aaggcggtgggagctgggga | 3342 | | |
| ALDH1L1 | 105 | intron22 + 1698 | attctggggagtcctggccc A/G ctatccactgccagggataa | 3343 | | |
| ABCA1 | 1 | (5′flanking region − 99) | acataaacagaggccgggaa G/C ggggcggggaggagggagag | 3361 | | |
| ABCA1 | 2 | (intron 1 159) | gcggtgttaaatggggagac G/T atgtcctagtacgagctctg | 3362 | | |
| ABCA1 | 3 | (intron 1 506) | aattggctatatgctcccc G/C ggactggagcggcacagtcc | 3363 | | |
| ABCA1 | 4 | (intron 1 5897) | gtacaaaaccctttagcttt T/G gcaaacctcctttaagaccc | 3364 | | |
| ABCA1 | 5 | (intron 1 5929) | ttaagacccgatttaaatgc C/T tccctcctcatgaagctctt | 3365 | | |
| ABCA1 | 6 | (intron 1 5962) | aagctcttctggatccactc T/C ttcccatcactaagttgaaa | 3366 | | |
| ABCA1 | 7 | (intron 1 5985) | cccatcactaagttgaaagt A/C agatccccttctctttactt | 3367 | | |
| ABCA1 | 8 | (intron 1 11416) | ttacagtgccctttatagga G/A agaaagaagaaattgtgtct | 3368 | | |
| ABCA1 | 9 | (intron 1 11935) | tctctgtggagcaaatagag G/A gctgtctgacacttggttcc | 3369 | | |
| ABCA1 | 10 | (intron 1 12281) | gaatgtttgatttgtgaaaa T/A cttaataacagtagtttttt | 3370 | | |
| ABCA1 | 11 | (intron 1 12924) | gtgctgacaatcttatactc T/C aggttgaacctccggggaag | 3371 | | |
| ABCA1 | 12 | (intron 1 13002) | gagcctcaatcacagattct C/G tctagctcacatgaagttaa | 3372 | | |
| ABCA1 | 13 | (intron 1 17715) | ggagcatgactttgtggaag C/T ctctcctcttccacccagag | 3373 | | |
| ABCA1 | 14 | (intron 1 17848) | gagggctgactgtcaccctt T/C gataggagcccagcactaaa | 3374 | | |
| ABCA1 | 15 | (intron 1 21384) | gtgggtgggaggaattggag G/C aggaagcttgcctaagtgtg | 3375 | | |
| ABCA1 | 16 | (intron 1 23063) | ggaggcacctgtgacaccca G/A cggagtaggggggcggtgtg | 3376 | | |
| ABCA1 | 17 | (intron 1 23131) | agtgtgcatatgtgctgacc G/A tgggagcttgtttgtcggtt | 3377 | | |
| ABCA1 | 18 | (intron 2 2801) | aagaaaagtgatttatttca A/G gttgctgatgcttagattgt | 3378 | | |
| ABCA1 | 19 | (intron 2 2830) | tgcttagattgttagagttg C/G aaagatctggcttgcatctt | 3379 | | |
| ABCA1 | 20 | (intron 2 2856) | tctggcttgcatcttgtaca A/G ctgacagaactggggctcag | 3380 | | |
| ABCA1 | 21 | (intron 2 3187) | tgatagctgttgcctgcagc A/G tacggacgttcattgcgcag | 3381 | | |
| ABCA1 | 22 | (intron 2 3190) | tagctgttgcctgcagcata C/T ggacgttcattgcgcagttc | 3382 | | |
| ABCA1 | 23 | (intron 2 3194) | tgttgcctgcagcatacgga C/T gttcattgcgcagttcctgt | 3383 | | |
| ABCA1 | 24 | (intron 2 3204) | agcatacggacgttcattgc G/A cagttcctgtctcctgagat | 3384 | | |
| ABCA1 | 25 | (intron 2 3401) | acataaagcctgtgtgctgc T/C gccaggaagactagaaacgc | 3385 | | |
| ABCA1 | 26 | (intron 2 13927) | gtcaccacatacctggcact A/G tgctaaggctgggaatgcag | 3386 | | |
| ABCA1 | 27 | (intron 3 4163) | ccagcccacttcatcttacc G/A tagttacctccttagagtat | 3387 | | |
| ABCA1 | 28 | (intron 3 4262) | tgtcaaagaggaactaagga T/C gccagggactttctgcttag | 3388 | | |
| ABCA1 | 29 | (intron 3 4306) | ccctctcatcacttctccaa C/T gctggtatcatgaaccccat | 3389 | | |
| ABCA1 | 30 | (intron 5 490) | gatgggcatttgaacttgtt G/A tctttaaaaagtgaaatctt | 3390 | | |
| ABCA1 | 31 | (intron 5 583) | tatctggggagtgggcattt T/G ctgactgaggcattggctgc | 3391 | | |
| ABCA1 | 32 | (intron 5 1051) | ggctacaaaactgtgctttc C/T ttgggcagtaaaagaggcaa | 3392 | | |
| ABCA1 | 33 | (intron 5 3051) | tagagaacaagtctaattct G/A ttttccttgaaatagtcgaa | 3393 | | |
| ABCA1 | 34 | (intron 5 3127) | aagtccatgattttttaggc A/G aaatggcctcctttcctctt | 3394 | | |
| ABCA1 | 35 | (intron 5 5924) | ctttctttcacaaaattgcc C/T cccagagctttctggaaggg | 3395 | | |
| ABCA1 | 36 | (intron 5 6831) | ccagtccctcagccttgcca T/C tgcttatgctggtctggaaa | 3396 | | |
| ABCA1 | 37 | (intron 5 12678) | gctcaccgctctgctcaccc G/C accctctggccatctcctct | 3397 | | |
| ABCA1 | 38 | (intron 5 14214) | cagcttggtcccagaggcct G/A gacctgggtcccagaggtcc | 3398 | | |
| ABCA1 | 39 | (intron 5 14257) | gctggttccccggcttggtc C/T cagaggcctggatgtgtggc | 3399 | | |
| ABCA1 | 40 | (intron 5 18078) | cctaccacaccatgcacgtg C/T acagccaagggttgttgact | 3400 | | |
| ABCA1 | 41 | (intron 5 18795) | ctgggctcttcctggacctg G/A ccagctaaaaggaaatctcc | 3401 | | |
| ABCA1 | 42 | (intron 5 18948) | gcattggtggtactaagaac G/A catattccctatcctatagg | 3402 | | |
| ABCA1 | 43 | (intron 5 19053) | ctcccccaacattaaaagtg T/C aagggatgcttattcaaatg | 3403 | | |
| ABCA1 | 44 | (intron 5 19148) | ggcccaagaaactgcatttt C/A gcatgctccctaaatgaagc | 3404 | | |
| ABCA1 | 45 | (intron 5 19229) | atgctaacagtgtagagtca C/T atgtgatgggaagcatcagg | 3405 | | |
| ABCA1 | 46 | (intron 5 19405) | cttgctcaatttattctgtc T/C atataactcaatattactga | 3406 | | |
| ABCA1 | 47 | (intron 5 19534) | catgtgaccctcttagctcc G/A cggattaactcctgtcctca | 3407 | | |
| ABCA1 | 48 | (coding region | gaaaccttctctgggttcct G/A tatcacaacctctctctccc | 3408 | | |
| | | 474 (Leu 158 Leu)) | | | | |
| ABCA1 | 49 | (intron 6 210) | gcaacctggcgtcatgggcc A/C gctggttaaaataaaattga | 3409 | | |
| ABCA1 | 50 | (intron 6 334) | acagttctgaggcaataacc G/A tggttaagggttattgatct | 3410 | | |
| ABCA1 | 51 | (intron 6 2288) | cttctttcaaagcttgtggt C/T cactggaccacgtatgaagt | 3411 | | |
| ABCA1 | 52 | (intron 6 2322) | atgaagtagaatagtttagg T/C ccagaaaggcaattaagtaa | 3412 | | |
| ABCA1 | 53 | (intron 6 2820) | gtgctttgatacattctgag T/G ttcagtaaagagacctgatg | 3413 | | |
| ABCA1 | 54 | (intron 7 416) | catcataaagatgacattgt G/A ggctgtcacagttggaaggc | 3414 | | |
| ABCA1 | 55 | (intron 7 471) | agaccacactatttagctta C/T ttagtaataacattgcaaag | 3415 | | |
| ABCA1 | 56 | (intron 7 504) | ttgcaaagaaaaattccgac G/A aagttttttcagcctaggaa | 3416 | | |
| ABCA1 | 57 | (intron 7 679) | gctctggtgaaattcctctc G/C ctaccccaaacatcatcatt | 3417 | | |
| ABCA1 | 58 | (intron 7 1740) | acaaatgctcaccctttcag C/T tggaatgattgaaattttgg | 3418 | | |
| ABCA1 | 59 | (intron 7 2122) | tgattaaggtggctactacc A/G ggtgctttctgcatatctcg | 3419 | | |
| ABCA1 | 60 | (intron 7 7753) | taggaattccaagctgtgaa T/C tttttactgaagctctttgg | 3420 | | |
| ABCA1 | 61 | (intron 7 8973) | atggaaatttgtttatattg A/T ctacagattgccaatattat | 3421 | | |
| ABCA1 | 62 | (intron 7 8976) | gaaatttgtttatattgact A/G cagattgccaatattattag | 3422 | | |
| ABCA1 | 63 | (intron 7 11327) | ctaacaatcttatttccatt G/C agtccttataaaagaagtgg | 3423 | | |
| ABCA1 | 64 | (intron 7 )11738 | ctgacgtttaagggagaccg C/T gtaggtccctttgaggactg | 3424 | | |
| ABCA1 | 65 | (intron 7 12295) | agtctgtaaattattgttct T/A ttttttctttagcttatgct | 3425 | | |
| ABCA1 | 66 | (intron 8 387) | tagcaaggccaatcatttta C/G caacacacatgcttgctaac | 3426 | | |
| ABCA1 | 67 | (intron 8 697) | ggaactgtctggtgtccccc A/T gcataggaagctgagccagg | 3427 | | |
| ABCA1 | 68 | (intron 8 3036) | ctttatgtgggaagaaattt T/G tttttttgattggggagtgg | 3428 | | |
| ABCA1 | 69 | (intron 8 3176) | aaatggcctggttctctgtc C/A cctttctgtctgtatgcctc | 3429 | | |
| ABCA1 | 70 | (intron 8 3364) | ggcagaaggcaaagcttagg A/T cctagagagtgctggaccac | 3430 | | |
| ABCA1 | 71 | (intron 8 3373) | caaagcttaggacctagaga G/A tgctggaccacgccactcac | 3431 | | |
| ABCA1 | 72 | (intron 8 3561) | cagggatttattaatgattt C/A ttgtgaaatgtttggaaata | 3432 | | |
| ABCA1 | 73 | (intron 8 3654) | agtgccggaatacatttgca T/C gtaagacagaacgctgcctg | 3433 | | |
| ABCA1 | 74 | (intron 8 4715) | ggcagaggggtctcagaatc C/T gcatttccaacaatgtctcc | 3434 | | |
| ABCA1 | 75 | (coding region | cgtattgtctgcgggcatcc C/T gagggaggggggctgaagat | 3435 | | |
| | | 936 (Pro 312 Pro)) | | | | |
| ABCA1 | 76 | (intron 9 2309) | cccctcaagagtcagtttaa A/G tgttggtcatgttagttgtc | 3436 | | |
| ABCA1 | 77 | (intron 9 2392) | atgggagggcttgtgcttca T/C gaaaacatttttccagatca | 3437 | | |
| ABCA1 | 78 | (intron 10 228) | tggggatggggaggactggc A/G cagggctgctgtgatggggt | 3438 | | |
| ABCA1 | 79 | (intron 10 319) | ttctgcggtccctggctccc C/T acctgactccaggtgaacaa | 3439 | | |
| ABCA1 | 80 | (intron 11 377) | gaaagaagtgtgggagcaaa A/C gcatgatgttacatgtagac | 3440 | | |
| ABCA1 | 81 | (intron 11 521) | agtgctctagagacaattgg G/A ttcaaatgtggagcaggctg | 3441 | | |
| ABCA1 | 82 | (intron 11 2850) | ctctatacaatcattatgct G/C ccattgaaataataaataca | 3442 | | |
| ABCA1 | 83 | (intron 11 2976) | ctccaattcggtagaaccag A/G gcttcatcttctctgtcgaa | 3443 | | |
| ABCA1 | 84 | (intron 11 3056) | gtttgcagctgctgtttttc C/T ggcagcacatctgtgcaggc | 3444 | | |
| ABCA1 | 85 | (intron 12 340) | ggcattatttgtgaaactta T/C ctaaaatcgaattcgggtcc | 3445 | | |
| ABCA1 | 86 | (intron 12 381) | aattaaatttttgaaatttt A/G tattaaaaattatattagta | 3446 | | |
| ABCA1 | 87 | (intron 14 1728) | caggctcagaggccttggcc C/T atcaccctggctcacgtgtg | 3447 | | |
| ABCA1 | 88 | (coding region | atgggcctggacaacagcat C/A ctctggtttagctggttcat | 3448 | | |
| | | 2040 (Ile 680 Ile)) | | | | |
| ABCA1 | 89 | (intron 15 1382) | cttttagacagaaaagttac G/A tgggatattatctcccacag | 3449 | | |
| ABCA1 | 90 | (intron 15 1453) | tatataaggagaaaccagtt G/A aaattacctattgaagaaac | 3450 | | |
| ABCA1 | 91 | (intron 15 1567) | ttctgcgtagttttgggtaa G/A tcacttatcttctttaggat | 3451 | | |
| ABCA1 | 92 | (intron 15 1617) | cagttgcctcatcagaaaga T/A gaacagcattacgcctctgc | 3452 | | |
| ABCA1 | 93 | (intron 16 95) | agttgagaacagaagatgat T/A gtcttttccaatgggacatg | 3453 | | |
| ABCA1 | 94 | (intron 16 452) | tggtgctttgcttgagtaat G/A ttttctgaactaagcacaac | 3454 | | |
| ABCA1 | 95 | (intron 16 657) | ctgttgcctcagtctgggct T/C cataggcatcagcagcccca | 3455 | | |
| ABCA1 | 96 | (intron 18 1730) | tgaaagttcaagcgcagtgc C/G ctgtgtccttacactccact | 3456 | | |
| ABCA1 | 97 | (intron 19 426) | aggaccttacagtgggtagt A/G tcaggaggggtcaggggctg | 3457 | | |
| ABCA1 | 98 | (intron 19 468) | aaagcaccagcgttagcctc A/G gtggcttccagcacgattcc | 3458 | | |
| ABCA1 | 99 | (intron 20 876) | ccctcctcatctaaagtgaa C/T acatggggctcatgtgcagg | 3459 | | |
| ABCA1 | 100 | (intron 22 118) | catgggatactcttctgtta T/G cacagaagagataaagggca | 3460 | | |
| ABCA1 | 101 | (intron 22 560) | aaagctttgccattctaggg G/A tcatagccatacagggtgaa | 3461 | | |
| ABCA1 | 102 | (intron 23 102) | accccttttgccatgttgaa A/G ccaccatctccctgctctgt | 3462 | | |
| ABCA1 | 103 | (intron 23 287) | gtcaaagaaaagagacttgt C/T aagaggtaagagccttggct | 3463 | | |
| ABCA1 | 104 | (intron 23 1063) | acctttcaccctcaggaagc G/A aggctgttcacacggcacac | 3464 | | |
| ABCA1 | 105 | (intron 25 321) | ctctttacttaagtacagtg T/G gaggaacagcggcatcagga | 3465 | | |
| ABCA1 | 106 | (intron 25 376) | gttagaaattcagcaacttg G/C gcccagctcagacctactga | 3466 | | |
| ABCA1 | 107 | (intron 25 478) | catacataggaaatgacaaa C/T gtttatggatggatagtcta | 3467 | | |
| ABCA1 | 108 | (intron 25 579) | tcatttaattctcaaaaaaa G/T atgaaaaaatgaacactcag | 3468 | | |
| ABCA1 | 109 | (intron 27 153) | aatggtaaaagccacttgtt C/T tttgcagcatcgtgcatgtg | 3469 | | |
| ABCA1 | 110 | (intron 28 1058) | actatcatgggagataatga C/T tatggttgtccatgattgga | 3470 | | |
| ABCA1 | 111 | (intron 28 1317) | caggacccagtgttctgagt C/T accctgaatgtgagcactat | 3471 | | |
| ABCA1 | 112 | (intron 30 372) | tatatgatttttaggttttg T/C ttatcagcttcttcgctttt | 3472 | | |
| ABCA1 | 113 | (intron 30 506) | ccttttaaaaagtaagcagt A/G gataaataaattcagtgaag | 3473 | | |
| ABCA1 | 114 | (intron 30 1033) | ctggatttcatggtgccttt G/C attttccacatgaaggttgt | 3474 | | |
| ABCA1 | 115 | (coding region | tcttccctttgcagagacac G/A ccctgccaggcaggggagga | 3475 | | |
| | | 4281 (Thr 1427 Thr)) | | | | |
| ABCA1 | 116 | (intron 33 626) | ggctccttgttactgatttc C/T gtcttttctctctgcctttt | 3476 | | |
| ABCA1 | 117 | (intron 33 719) | taatagccctcatgctagaa G/A ggagccggagcctgtgtata | 3477 | | |
| ABCA1 | 118 | (intron 33 726) | cctcatgctagaagggagcc G/A gagcctgtgtataaggccag | 3478 | | |
| ABCA1 | 119 | (intron 33 889) | ctttcctcaatgtctcagct A/G tctaactgtgtgtgtaatca | 3479 | | |
| ABCA1 | 120 | (intron 33 1097) | ctgtgcaccccactgtctgg G/C ttttaatgtcaggctgttct | 3480 | | |
| ABCA1 | 121 | (intron 35 234) | aacctatctaaacctcagtt T/C cctcatctgtgaaatggaga | 3481 | | |
| ABCA1 | 122 | (intron 37 411) | aactctgtacattttatcag C/T agcttatccatccattgcaa | 3482 | | |
| ABCA1 | 123 | (intron 37 1224) | caggcataggtgattcagag A/G tgaaaggtcaagtccctgaa | 3483 | | |
| ABCA1 | 124 | (intron 37 1720) | aaattaaaattactctgact G/T ggaatccatcgttcagtaag | 3484 | | |
| ABCA1 | 125 | (intron 40 251) | tgaaggtaaggaaaatagtg T/G tatttgcttggatccactgg | 3485 | | |
| ABCA1 | 126 | (intron 40 252) | gaaggtaaggaaaatagtgt T/C atttgcttggatccactggc | 3486 | | |
| ABCA1 | 127 | (intron 40 319) | agcactggaaaagtcaaacc A/G taactttgagaattaggtga | 3487 | | |
| ABCA1 | 128 | (intron 40 957) | cttgttactcttttttcctt G/C tcatgggtgatagccatttg | 3488 | | |
| ABCA1 | 129 | (intron 41 146) | tgatgtgggcatcccgcagc C/T ccctccctgcccatcctgga | 3489 | | |
| ABCA1 | 130 | (intron 42 239) | catttggtttatatgcttac A/C tttatgtgttagttattaaa | 3490 | | |
| ABCA1 | 131 | (intron 42 321) | aataaatggttgattttgag T/A ttgagtttcatagtccaaaa | 3491 | | |
| ABCA1 | 132 | (intron 42 322) | ataaatggttgattttgagt T/C tgagtttcatagtccaaaaa | 3492 | | |
| ABCA1 | 133 | (intron 42 533) | agatgaaaaattatgtagat G/A ataatgaatgatacggttct | 3493 | | |
| ABCA1 | 134 | (intron 42 546) | tgtagatgataatgaatgat A/G cggttctaaaaagacaggtt | 3494 | | |
| ABCA1 | 135 | (intron 43 739) | tacagccacacttaaaatgg T/A cccattatgaaatacatatt | 3495 | | |
| ABCA1 | 136 | (intron 44 18) | taggtgagaaaagaagtggc T/C tgtattttgctgcaaagact | 3496 | | |
| ABCA1 | 137 | (intron 44 264) | acaatataatttgcttgttt T/C ttaagagtataatttagtga | 3497 | | |
| ABCA1 | 138 | (intron 44 279) | tgttttttaagagtataatt T/C agtgatttttggtaaattga | 3498 | | |
| ABCA1 | 139 | (intron 44 508) | tttacattgctacataaaat C/T cccctatgtacatgtaccta | 3499 | | |
| ABCA1 | 140 | (intron 44 1477) | gatctcctctcctgtctctt A/T catttttgcagtagcaatgt | 3500 | | |
| ABCA1 | 141 | (intron 44 1665) | tggttgtaagaactgatttg G/A ttggtatagctgtgagggcc | 3501 | | |
| ABCA1 | 142 | (intron 44 1956) | gtgttgctcacactcaaaat T/G tctgggccttctcatttggt | 3502 | | |
| ABCA1 | 143 | (intron 45 68) | aatatataccttatggcttt T/C ccacacgcattgacttcagg | 3503 | | |
| ABCA1 | 144 | (intron 46 608) | ttatactgacttcaatagag G/C tttcagacaaaaagttgttt | 3504 | | |
| ABCA1 | 145 | (intron 47 336) | ttcacaattgtaaacaccac T/C acactgaacagcatcatccc | 3505 | | |
| ABCA1 | 146 | (3′untranslated region | aacaaaaatgtgggtgtctc C/T aggcacgggaaacttggttc | 3506 | | |
| | | 7479) | | | | |
| ABCA1 | 147 | (3′untranslated region | aggagcccactgtaacaata C/T tgggcagccttttttttttt | 3507 | | |
| | | 8226) | | | | |
| ABCA1 | 148 | (3′untranslated region | ttccagaatttgaatattaa C/T gctaaaggtgtaagacttca | 3508 | | |
| | | 8697) | | | | |
| ABCA1 | 149 | (3′untranslated region | aactattttgaagaaaacac A/G acattttaatacagattgaa | 3509 | | |
| | | 9097) | | | | |
| ABCA1 | 150 | (5′flanking region | tgacttaaatatttagacat (AT) acattttaatacagattgaa | 3510 | | |
| | | (−1033)− (−1032)) | | | | |
| ABCA1 | 150 | (5′flanking region | tgacttaaatatttagacat ggtgtgtaggcctgcattcc | 3511 | | |
| | | (−1033)− (−1032)) | | | | |
| ABCA1 | 151 | (intron 5 6368) | ttctgatggggttgttgctg C/Δ tgagaatcatgactgggtgg | 3512 | | |
| ABCA1 | 152 | (intron 5 9709) | cattttctgtctgaaccccc T/Δ cacccattcaggcagctgct | 3513 | | |
| ABCA1 | 153 | (intron 5 13816) | tccctacttctccttttttt T/Δ catttgcctcctccacccac | 3514 | | |
| ABCA1 | 154 | (intron 10 270 − 271) | cttttcagggaggagccaaa (G) cgctcattgtctgtgcttct | 3515 | | |
| ABCA1 | 154 | (intron 10 270 − 271) | cttttcagggaggagccaaa cgctcattgtctgtgcttct | 3516 | | |
| ABCA1 | 155 | (intron 20 611 − 612) | tttagcccatcctctccccc (C) gccaccctccttattgaggc | 3517 | | |
| ABCA1 | 155 | (intron 20 611 − 612) | tttagcccatcctctccccc gccaccctccttattgaggc | 3518 | | |
| ABCA1 | 156 | (intron 32 391 − 392) | gagtgccttgggtactctct (T) gatgggggactccatgataa | 3519 | | |
| ABCA1 | 156 | (intron 32 391 − 392) | gagtgccttgggtactctct gatgggggactccatgataa | 3520 | | |
| ABCA1 | 157 | (intron 37 847) | gctgtatattgtgaatgtcc C/Δ gttttcaaaagcaaagccaa | 3521 | | |
| ABCA4 | 1 | (5′flanking region | tgccatcataagcagaaact A/C tctctctcttcttggaagct | 3522 | | |
| | | −1005) | | | | |
| ABCA4 | 2 | (5′flanking region | gtctagagtctttcaaagag A/T acacattctgagatttgagg | 3523 | | |
| | | −819) | | | | |
| ABCA4 | 3 | (5′flanking region | agcaccaccccattgcaggg C/A tggaatgacagtaatgggcc | 3524 | | |
| | | −680) | | | | |
| ABCA4 | 4 | (intron 1 208) | tgcccttcccaggaagatgt G/A tttctctgtcctcagccaca | 3525 | | |
| ABCA4 | 5 | (intron 1 234) | ctgtcctcagccacatgaaa A/G tcttttgcctaccgtgcctg | 3526 | | |
| ABCA4 | 6 | (intron 1 510) | agctcacgatcaagtcacag T/C ttaactggacacattatttt | 3527 | | |
| ABCA4 | 7 | (intron 1 1527) | gcttaacaaccagcataaaa G/A agagcagcatgggacacgct | 3528 | | |
| ABCA4 | 8 | (intron 1 2077) | caggactgtagctgctggcc T/C aaaatgagcccattcctgtg | 3529 | | |
| ABCA4 | 9 | (intron 1 2174) | ccctctcaatctggcctttc G/C ctggcatgggtgggcgactc | 3530 | | |
| ABCA4 | 10 | (intron 1 2246) | gctcccagggagatggagcc A/G ctcgggctgagggccttggc | 3531 | | |
| ABCA4 | 11 | (intron 1 2364) | ttctgtctggcacgcctccc G/A atggctccccacctgctacc | 3532 | | |
| ABCA4 | 12 | (intron 1 4243) | ctccctggggtatgcctgta C/G gcagttaagcgtcaaggaca | 3533 | | |
| ABCA4 | 13 | (intron 1 4287) | atgccgctctggggagggga A/C gctgagcatgattttggaag | 3534 | | |
| ABCA4 | 14 | (intron 1 4309) | ctgagcatgattttggaagc C/T ggcagaagaggctattgtga | 3535 | | |
| ABCA4 | 15 | (intron 1 4416) | tgcagcaaccgcccccgccc C/T ccgccaaaaacaaacacact | 3536 | | |
| ABCA4 | 16 | (intron 1 4996) | tttacccctggaacaggcag G/A ccaagctggc t/c ggtcccctc | 3537 | | |
| ABCA4 | 17 | (intron 1 5007) | aacaggcag g/a ccaagctggc T/C ggtcccctccctgatacaca | 3538 | | |
| ABCA4 | 18 | (intron 1 5080) | gtgtgtggctggtttcttag C/G aagcaccatggttccaagtt | 3539 | | |
| ABCA4 | 19 | (intron 1 5152) | gggagatgaacgtaagtgga G/A ggcaggcctacaaggttgca | 3540 | | |
| ABCA4 | 20 | (intron 1 7110) | ccactggatctgcttttgga A/G tcaagagtccttaagctcca | 3541 | | |
| ABCA4 | 21 | (intron 1 7290) | gatttttgttggctttgcaa T/A ggatcacagtcatttattca | 3542 | | |
| ABCA4 | 22 | (intron 1 7483) | tctgagcctctttccttaac T/C gcagagtgagtgg c/t tacaga | 3543 | | |
| ABCA4 | 23 | (intron 1 7497) | cttaac t/c gcagagtgagtgg C/T tacagagaaatctttactac | 3544 | | |
| ABCA4 | 24 | (intron 2 1067) | tcaagcagcagcagcaactg C/A gtggagtcttcttgaactaa | 3545 | | |
| ABCA4 | 25 | (intron 2 1243) | cacccagcacagggactggc A/T cacatgagatgctcctgctt | 3546 | | |
| ABCA4 | 26 | (intron 3 26) | tgttgagatccctaccatgc A/G ggggaggaagttgcacaccc | 3547 | | |
| ABCA4 | 27 | (intron 3 101) | agcatggagcactgagtgtt C/T ttgtggctttgctgagcccc | 3548 | | |
| ABCA4 | 28 | (intron 3 330) | tgcttgggtggagtgaatca T/C tgtaggagaaaaactcagtt | 3549 | | |
| ABCA4 | 29 | (intron 3 470) | tgaagtcaggtttacaaagt C/G aagtttacttcttgggagaa | 3550 | | |
| ABCA4 | 30 | (intron 3 634) | tgaaaaccaatgacccctct T/C ccaagaaaaatggccacata | 3551 | | |
| ABCA4 | 31 | (intron 3 1016) | ccttgggggagctcagtatg A/G ttcttccaggagaagcctgc | 3552 | | |
| ABCA4 | 32 | (intron 3 1554) | gaaagttgggtttcatgttt T/C ccaagaaaaatggccacata | 3553 | | |
| ABCA4 | 33 | (intron 3 1686) | ctagacattctcacagagcc A/G agggcagcaaggcggggctc | 3554 | | |
| ABCA4 | 34 | (intron 3 1823) | ttcacctctctccatggacc A/G agggcagcaaggcggggctc | 3555 | | |
| ABCA4 | 35 | (intron 3 1938) | caaattcctgggaacaaatc G/A ggttgacccagc t/g ttattct | 3556 | | |
| ABCA4 | 36 | (intron 3 1951) | acaaatc g/a ggttgacccagc T/G ttattctccctgtcccatca | 3557 | | |
| ABCA4 | 37 | (intron 3 2063) | ggctgtcagagcctacctgc G/T tgaatgggtggaagg g/a cagg | 3558 | | |
| ABCA4 | 38 | (intron 3 2079) | ctgc t/g tgaatgggtggaagg G/A caggtctcagagaattgggt | 3559 | | |
| ABCA4 | 39 | (intron 3 2186) | agacacacagagcatgggac C/T gagaggcgagcagaccctgc | 3560 | | |
| ABCA4 | 40 | (intron 3 2214) | gagcagaccctgccaaaact G/A ggagactgaatagatcgctc | 3561 | | |
| ABCA4 | 41 | (intron 4 3182) | cccccagagccacagcagcc C/G tgtctcctgggtggtcttgt | 3562 | | |
| ABCA4 | 42 | (intron 4 3515) | agtataataaaagcaggagc C/T atagcccccaactctcaaga | 3563 | | |
| ABCA4 | 43 | (intron 4 3952) | agagaagccactgtgccact G/C tgtggtcgaacttcaagacc | 3564 | | |
| ABCA4 | 44 | (intron 4 4637) | aatcacttgccccaaggtca C/T cttaactgttaggtgttctt | 3565 | | |
| ABCA4 | 45 | (intron 4 5319) | acctctaggggctcccagag A/G ccccaagaacagaaccttcc | 3566 | | |
| ABCA4 | 46 | (intron 6 2266) | cacccttgcagacctcagac G/A ggtcctgggggcttgctttc | 3567 | | |
| ABCA4 | 47 | (intron 6 2857) | ccagaggagaaagctctgcc G/A tag t/c cggcctcagttaacca | 3568 | | |
| ABCA4 | 48 | (intron 6 2861) | aggagaaagctctgcc g/a tag T/C cggcctcagttaaccacgga | 3569 | | |
| ABCA4 | 49 | (intron 6 3078) | gcaggcattaaaatgggact T/G tgcctttattgctcctgggc | 3570 | | |
| ABCA4 | 50 | (intron 6 3375) | ttaaatgccaaatgagttct C/G attaacaaagaaagagggaa | 3571 | | |
| ABCA4 | 51 | (intron 6 3412) | ggaaaatctcagtaaaccac C/T gtgacggcatctacccactt | 3572 | | |
| ABCA4 | 52 | (intron 6 4635) | ctttcgggtggatattgcta C/T gtcaagtgtctgggaaagcc | 3573 | | |
| ABCA4 | 53 | (intron 6 −264) | aaacagcaattagaatcact T/C tgaaatagtgatagtattta | 3574 | | |
| ABCA4 | 54 | (intron 7 828) | gatgtgggaaagttagagaa G/C agcccattgtactaatgctc | 3575 | | |
| ABCA4 | 55 | (intron 7 1019) | aggcttcttgactgtctaga T/C agcaagtctaatcatttgtg | 3576 | | |
| ABCA4 | 56 | (intron 8 374) | gtaaacacggctgtgggatg C/A ttttacaaacacaatatcgt | 3577 | | |
| ABCA4 | 57 | (intron 8 874) | tgatgagcttgttattggtg G/A ggtacagcctattaatttag | 3578 | | |
| ABCA4 | 58 | (intron 9 605) | tcgtgtctctgtcttgatct C/T tgtctggttttaggccaact | 3579 | | |
| ABCA4 | 59 | (coding region 1268 | aacttttgaagaactggaac G/A c/t gttaggaagttggtcaaag | 3580 | | |
| | | (Arg 423 Arg or His 423 | | | | |
| | | His)) | | | | |
| ABCA4 | 60 | (coding region 1269 | acttttgaagaactggaac g/a C/T gttaggaagttggtcaaagc | 3581 | | |
| | | (Arg 423 Arg or His 423 | | | | |
| | | His)) | | | | |
| ABCA4 | 61 | (intron 11 5687) | atcatgtaatgtactttaga C/G tcagatatataaatatttgt | 3582 | | |
| ABCA4 | 62 | (intron 11 7136) | gacttcccaacttaccttag T/C ggagctgtagtcacatagaa | 3583 | | |
| ABCA4 | 63 | (intron 11 7180) | acgctcataaatgcttctct G/A ggctgtaaaggttgaatttt | 3584 | | |
| ABCA4 | 64 | (intron 11 7701) | gttagacgcaggcattacct C/T gtggctttgccccagtgtga | 3585 | | |
| ABCA4 | 65 | (intron 11 8073) | gggatgtttgcccacatcca T/C tggcatttctcaaaaggaac | 3586 | | |
| ABCA4 | 66 | (intron 11 8586) | cagctgcctgcgctggagag G/A gctcaaacctcttccgccag | 3587 | | |
| ABCA4 | 67 | (intron 11 11234) | cccaaataattttgtttttc G/A ttttaggaattaaatttcag | 3588 | | |
| ABCA4 | 68 | (intron 11 11641) | aagaaacaaacatttattga C/G aacttttggtgtgtgacctg | 3589 | | |
| ABCA4 | 69 | (intron 11 11808) | tggtatttcttaaagaaata C/T caattccatttccttttaac | 3590 | | |
| ABCA4 | 70 | (intron 11 11923) | aagatcattattaatatctc A/G tcagcgtggtgtcacttaag | 3591 | | |
| ABCA4 | 71 | (intron 12 305) | tcaccctgtggtcgggaggt G/A tgagtgagctatccaagccc | 3592 | | |
| ABCA4 | 72 | (intron 13 1461) | ttgggtttcagtgtcagcat G/A tagctgtctactcagatccc | 3593 | | |
| ABCA4 | 73 | (intron 14 1268) | ggagctgagccccttgtcct T/C atctaggtttcccttgttct | 3594 | | |
| ABCA4 | 74 | (intron 17 23) | gagtcctttaaaacacaaat C/G ttaatgtttgaaatcaactc | 3595 | | |
| ABCA4 | 75 | (intron 17 715) | gggactcccctagagctgaa G/A tactctcccatctgtttgtt | 3596 | | |
| ABCA4 | 76 | (intron 18 1282) | ggaagatgaagaacctaagc C/T gcttccagaaattcatgagg | 3597 | | |
| ABCA4 | 77 | (intron 20 − 195) | acagattattccattgtatg C/A atgaactatgtaagccatcc | 3598 | | |
| ABCA4 | 78 | (intron 23 755) | ctggctgccgctggggtttc C/T tatgtccatccacggggagg | 3599 | | |
| ABCA4 | 79 | (intron 26 702) | tatcaaatacaactcagacg T/G cagtctcctggcccctttga | 3600 | | |
| ABCA4 | 80 | (intron 27 156) | cctgctttccaaacccttat C/T ttgattcttggtaacatgaa | 3601 | | |
| ABCA4 | 81 | (intron 27 385) | tttaaagaacagtgagtcac G/A tgacttgctctttgaaatgc | 3602 | | |
| ABCA4 | 82 | (intron 28 299) | gacatgccatcagaccactg C/T gagtgttcaggcagcctacc | 3603 | | |
| ABCA4 | 83 | (intron 29 168) | ctccttccacacttgtgtgc A/G gggacattcactacctccta | 3604 | | |
| ABCA4 | 84 | (intron 29 497) | gctgtcaataaggaccaaaa C/T agactaatttcaaattcctc | 3605 | | |
| ABCA4 | 85 | (intron 29 567) | agctgctaggaataaaaagg G/A agacaaaac g/a atccacaagc | 3606 | | |
| ABCA4 | 86 | (intron 29 577) | aataaaaagg g/a agacaaaac G/A atccacaagctagagatggt | 3607 | | |
| ABCA4 | 87 | (intron 30 − 2494) | aatcagagctcatctgctgc A/G tcatagggatcccaaaagaa | 3608 | | |
| ABCA4 | 88 | (intron 30 − 2169) | aatgtaacagccaaagtcct A/G gaaaaaggcaagccagttcc | 3609 | | |
| ABCA4 | 89 | (intron 31 535) | ctaactgtgaattatcatct T/G tgatcactgccctttgagat | 3610 | | |
| ABCA4 | 90 | (intron 35 209) | tctccccaacatttatgtgg C/A aagtaagtttacatttggtt | 3611 | | |
| ABCA4 | 91 | (intron 37 525) | taaatttgaatgagtaattc A/G tccatctcggcctcagtttc | 3612 | | |
| ABCA4 | 92 | (intron 37 766) | tgttgcaggctggagaaccc T/G cctatgaattgtacagggct | 3613 | | |
| ABCA4 | 93 | (intron 37 856) | aaaaccccatgaagtggtca A/G ggcaggcatcattatctcca | 3614 | | |
| ABCA4 | 94 | (intron 38 62) | tagtagagtatgtgttggtc G/A agcagagccaggggcaagca | 3615 | | |
| ABCA4 | 95 | (intron 38 761) | tccttgggcaagttaatctt G/A atgaagagactgggtgttct | 3616 | | |
| ABCA4 | 96 | (intron 38 1315) | cagagtcagactctggaaag G/T c/a ggggggataagaacacagc | 3617 | | |
| ABCA4 | 97 | (intron 38 1316) | agagtcagactctggaaag g/t C/A ggggggataagaacacagcc | 3618 | | |
| ABCA4 | 98 | (intron 38 1561) | gtattttcatgtaaattatc C/A g/a atacacagctgctatggaa | 3619 | | |
| ABCA4 | 99 | (intron 38 1562) | tattttcatgtaaattatc c/a G/A atacacagctgctatggaaa | 3620 | | |
| ABCA4 | 100 | (intron 38 2874) | ctagacaaagggg a/c agctcc C/T gcccactagaaacttgcagg | 3621 | | |
| ABCA4 | 101 | (intron 40 1904) | gacactgtacagccagccca A/C tcctgaccccttttcttcat | 3622 | | |
| ABCA4 | 102 | (coding region 5814 | ggaaataaaactgacatctt A/G aggctacatgaactaaccaa | 3623 | | |
| | | (Leu 1938 Leu)) | | | | |
| ABCA4 | 103 | (intron 41 122) | ggaaataaaactgacatctt A/G aggctacatgaactaaccaa | 3624 | | |
| ABCA4 | 104 | (intron 41 411) | atttggttcccagttttatg T/G agggtcatcatccctgtgtt | 3625 | | |
| ABCA4 | 105 | (intron 41 443) | gttctcagtccggtttcttc G/A tatcttgcagatttatcc a/g g | 3626 | | |
| ABCA4 | 106 | (coding region 5844 | c g/a tatcttgcagatttatcc A/G ggcacctccagcccagcagt | 3627 | | |
| | | (Pro 1948 Pro)) | | | | |
| ABCA4 | 107 | (intron 43 328) | tttgtagcctattcctataa A/G aatgcaccattgcttc c/g cat | 3628 | | |
| ABCA4 | 108 | (intron 43 345) | taa a/g aatgcaccattgcttc C/G cattacctccctccacacat | 3629 | | |
| ABCA4 | 109 | (intron 43 370) | acctccctccacacattttt A/G caaaa c/t gtttcagggagttt | 3630 | | |
| ABCA4 | 110 | (intron 43 376) | ctccacacattttt a/g caaaa C/T gtttcagggagtttactgag | 3631 | | |
| ABCA4 | 111 | (intron 43 670) | ttaaacagactggtccccta T/C gggcaggacagagaggatga | 3632 | | |
| ABCA4 | 112 | (intron 43 822) | gttaggtgctgctgacatct G/A tccagcatctgcttgactgg | 3633 | | |
| ABCA4 | 113 | (intron 43 915) | ggcaggacgagtcctgagca C/T gcttcactggctcagacagg | 3634 | | |
| ABCA4 | 114 | (intron 43 1242) | actgagctggacgctagaaa G/T aaactataggcttaagacac | 3635 | | |
| ABCA4 | 115 | (intron 43 1671) | tagagaagtttacttccatc G/A ggacacatgcatcttttcta | 3636 | | |
| ABCA4 | 116 | (intron 43 2036) | ttgaaggatactcagtaatt G/A ctttttttcttgcagtattt | 3637 | | |
| ABCA4 | 117 | (intron 45 176) | gtgtttggttcacacagctc C/T ggagaaaaacaagtca c/t ggc | 3638 | | |
| ABCA4 | 118 | (intron 45 193) | ctc c/t ggagaaaaacaagtca C/T ggcacagccttgacttggga | 3639 | | |
| ABCA4 | 119 | (intron 47 238) | cccaagtctctggatggggc A/G tctgatcaggatgcatgcag | 3640 | | |
| ABCA4 | 120 | (intron 47 269) | atgcatgcagagcctggctg G/A gatgagggagggctgctacc | 3641 | | |
| ABCA4 | 121 | (intron 47 326) | accacttatctcaacagatc C/G gggacctgtggcctatttac | 3642 | | |
| ABCA4 | 122 | (intron 47 715) | aagtcactaagctggttggt G/A ggaggaacagcacataac c/t c | 3643 | | |
| ABCA4 | 123 | (intron 47 734) | t g/a ggaggaacagcacataac C/T caccttatctatgctgaggt | 3644 | | |
| ABCA4 | 124 | (intron 47 931) | ggacactgcatagatatcta T/C agaaatagcagcatgtcagg | 3645 | | |
| ABCA4 | 125 | (intron 47 1260) | acactctctggtggaccatc A/C ctcatccaagagagggtaac | 3646 | | |
| ABCA4 | 126 | (intron 48 1663) | tctcgctcttctcttacctc T/C aggtgtttgtaaattttgct | 3647 | | |
| ABCA4 | 127 | (intron 49 127) | agagagccccacccacacca C/T ggtccctaccaagtccccac | 3648 | | |
| ABCA4 | 128 | (5′flanking region | gtaaatctcagttgaatcag (TCA)14-16 atttttcagtctggttcct | 3649 | | |
| | | (−1441)-(−1400)) | | | | |
| ABCA4 | 129 | (intron 1 4712-4720) | gaggggcggggactataggc (A)8-10 cagcctaattcaaggatgag | 3650 | | |
| ABCA4 | 130 | (intron 1 7295-7304) | ttgttggctttgcaa t/a ggat CACAGTCAT/Δ ttattcactcatt | 3651 | | |
| ABCA4 | 131 | (intron 2 951-952) | cctgtccatcagactcttct TT/Δ acctctccccgaggagccca | 3652 | | |
| ABCA4 | 132 | (intron 3 2642-2653) | cctgggtgacagagcgagat (A)10-12 tagcatgagatattattact | 3653 | | |
| ABCA4 | 133 | (intron 4 5202) | cacaaagcatctgacacccc C/Δ atccagccctggctaacttt | 3654 | | |
| ABCA4 | 134 | (intron 6 3029-3044) | cactaaaaacaaaaatttac (A)16-18 cctgaaagaaattgcaggca | 3655 | | |
| ABCA4 | 135 | (intron 6 5138-5139) | ttcatgacagatcagatgtt (G) cttttatggatttacaaaga | 3656 | | |
| ABCA4 | 135 | (intron 6 5138-5139) | ttcatgacagatcagatgtt cttttatggatttacaaaga | 3657 | | |
| ABCA4 | 136 | (intron 6 5985) | tttccttcttcaaacccccc C/Δ agactaggagaaggtctgtc | 3658 | | |
| ABCA4 | 137 | (intron 6 6094) | gggacggacagaaaaagacc T/Δ agtttctgttgagccaaaga | 3659 | | |
| ABCA4 | 138 | (intron 6 − 161) | tattttttcaattaaataaa A/Δ gagttttttgtttctaaaag | 3660 | | |
| ABCA4 | 139 | (intron 7 809-810) | gggccgagtatgcacactga (TG) tgtgggaaagttagagaa g/c a | 3661 | | |
| ABCA4 | 139 | (intron 7 809-810) | tattttttcaattaaataaa tgtgggaaagttagagaa g/ | 3662 | | |
| ABCA4 | 140 | (intron 8 472-484) | atcttccccacctttcacta (T)10-13 ggtcttctatggggtaaagg | 3663 | | |
| ABCA4 | 141 | (intron 9 48-71) | gtaccctggacctcccagaa (GT)11-13 gagagagatgtgccttcctg | 3664 | | |
| ABCA4 | 142 | (intron 9 554) | ataggggcagaaaagacaca A/Δ ccaaaagttctctctcactt | 3665 | | |
| ABCA4 | 143 | (intron 10 11) | catgatcagagtaagggggg G/Δ ttggaggatggggaggggag | 3666 | | |
| ABCA4 | 144 | (intron 11 4242) | ggagaggaaatgatgttagt G/Δ cctcctgtaaataggcccag | 3667 | | |
| ABCA4 | 145 | (intron 11 13743-13753) | tgctcttttgtgggtaatgg (T)9-11 cctcttccaggagaagaaaa | 3668 | | |
| ABCA4 | 146 | (intron 13 636-637) | cggggtggagggttgggagg (G) ctcatttgtcattatagatg | 3669 | | |
| ABCA4 | 146 | (intron 13 636-637) | cggggtggagggttgggagg ctcatttgtcattatagatg | 3670 | | |
| ABCA4 | 147 | (intron 18 569-570) | tgctgccctcatcttctctc TT/Δ aaactagttctgtatttctc | 3671 | | |
| ABCA4 | 148 | (intron 20 (− 304)-(-297) | tataacctgacttttttttc (A)7-9 ggattgcttttttaaacata | 3672 | | |
| ABCA4 | 149 | (intron 22 1236-1246) | gctgaattagttcccttggg (T)9-11 agttaactcctgatttttgc | 3673 | | |
| ABCA4 | 150 | (intron 26 4326-4635) | gataatcaatgctgtaaggg (A)9-10 tggcattagagatccagacc | 3674 | | |
| ABCA4 | 151 | (intron 33 115-116) | taaaaccgtcttgtttgttt GT/Δ ttacatggtttttagggccc | 3675 | | |
| ABCA4 | 152 | (intron 36 1078) | taagcagctatcacttaaca A/Δ tacaaaaccagagattatca | 3676 | | |
| ABCA4 | 153 | (intron 37 290-291) | ccttgaccaaagcctggggg (T) cagccattcccca a/g cccctc | 3677 | | |
| ABCA4 | 153 | (intron 37 290-291) | ccttgaccaaagcctggggg cagccattcccca a/g cccctc | 3678 | | |
| ABCA4 | 154 | (intron 38 896) | ataaaaagagggggaaaaaa A/Δ gaaggcagtcgctgcagggc | 3679 | | |
| ABCA4 | 155 | (intron 38 1209-1210) | gtggacccctgagactgact CT/Δ ttccagatcttgttagggtt | 3680 | | |
| ABCA4 | 156 | (intron 38 1322) | agactctggaaag g/t c/a ggggg G/Δ ataagaacacagccccag | 3681 | | |
| ABCA4 | 157 | (intron 38 3107) | gggccccacctgctgaagag A/Δ gggggggtggggtttgcccc | 3682 | | |
| ABCA4 | 158 | (intron 40 152) | ttttctccaataatacaagt CT/Δ ttccagatcttgttagggtt | 3683 | | |
| ABCA4 | 159 | (intron 43 330) | tgtagcctattcctataa a/g a A/Δ tgcaccattgcttc c/g ca | 3684 | | |
| ABCA4 | 160 | (intron 43 1354) | tttaattggcccagccatgc C/Δ tttggtggcttttgtcattg | 3685 | | |
| ABCA4 | 161 | (intron 47 1305-1308) | catcctgctgaaggagaaag AAAG/Δ caccaatggcccaagcccta | 3686 | | |
| ABCA7 | 1 | (5′flanking region − 1596) | agaatgttggccccctcccc C/T t c/t ctgcatcctctgcagaag | 3687 | | |
| ABCA7 | 2 | (5′flanking region − 1594) | aatgttggccccctcccc c/t t C/T ctgcatcctctgcagaagcc | 3688 | | |
| ABCA7 | 3 | (5′flanking region − 1180) | ggccagtgagtgacgggcag G/A tcgcccaaatagcagcgtgc | 3689 | | |
| ABCA7 | 4 | (5′flanking region − 460) | agagctggggtcgtgcctcc A/G gctgggcaactgcctgtctc | 3690 | | |
| ABCA7 | 5 | (5′untranslated region | ctctgtcccgtcccctgccc A/G gtctcaccatggccttctgg | 3691 | | |
| ABCA7 | 6 | (intron 5 91) | ccccgggccaaggacctccc G/A ttccaggcatccaggctgtc | 3692 | | |
| ABCA7 | 7 | (coding region 563 | cagcttgttggaggccgctg A/G ggacctggcccaggaggtac | 3693 | | |
| | | (Glu 188 Gly)) | | | | |
| ABCA7 | 8 | (intron 8 103) | gccggagggtcacggaaact A/G tttgaagaagtaggagttag | 3694 | | |
| ABCA7 | 9 | (intron 8 166) | tgcggaggatcagaggcaca C/T gcaggagcaaggcagagggg | 3695 | | |
| ABCA7 | 10 | (coding region 955 | accggaccttcgaggagctc A/G ccctgctgagggatgtccgg | 3696 | | |
| | | (Thr 319 Ala)) | | | | |
| ABCA7 | 11 | (intron 9 421) | tttttttttttttttttttt T/A taagagatggagtctcactc | 3697 | | |
| ABCA7 | 12 | (intron 9 463) | gttgcccaggctggactgca G/A tgg c/t gagatcttggctcact | 3698 | | |
| ABCA7 | 13 | (intron 9 467) | cccaggctggactgca g/a tgg C/T gagatcttggctcactgcaa | 3699 | | |
| ABCA7 | 14 | (intron 9 488) | gagatcttggctcactgcaa C/T ctccgcctcctggattcaag | 3700 | | |
| ABCA7 | 15 | (coding region 1184 | cgcacacgctgatgtggggc A/G cctggtgggcacgctgggcc | 3701 | | |
| | | (His 395 Arg)) | | | | |
| ABCA7 | 16 | (intron 10 10) | gagtgacggaggtgagggcc T/C gtccacctgcggggtctgtt | 3702 | | |
| ABCA7 | 17 | (coding region 1824 | cctgggccccggccacgtgc G/A catcaaaatccgcatggaca | 3703 | | |
| | | (Arg 463 His)) | | | | |
| ABCA7 | 18 | (intron 13 55) | ggtgcgctggagggtgacag A/G caggggcggccccacgtggg | 3704 | | |
| ABCA7 | 19 | (coding region 1824 | cccttcctgctcagcgccgc A/G ctgctggttctggtgctcaa | 3705 | | |
| | | (Ala 608 Ala)) | | | | |
| ABCA7 | 20 | (intron 13 55) | ggtgcgctggagggtgacag A/G caggggcggccccacgtggg | 3706 | | |
| ABCA7 | 21 | (intron 13 78) | ggggcggccccacgtgggtg C/A gcgcccccaggccaatccag | 3707 | | |
| ABCA7 | 22 | (coding region 1851 | cgttgcctctcacagctggg A/G gacatcctcccctacagcca | 3708 | | |
| | | (Gly 617 Gly)) | | | | |
| ABCA7 | 23 | (coding region 2153 | cgagggcgcgcagtggcaca A/C cgtgggcacccggcctacgg | 3709 | | |
| | | (Asn 718 Thr)) | | | | |
| ABCA7 | 24 | (intron 15 34) | ggcggggctccgggccgggt C/G gcacctgctttgcgggaggc | 3710 | | |
| ABCA7 | 25 | (intron 16 8) | ctggacccaaagggtgaggc A/C ctacgaggcttaatagctgg | 3711 | | |
| ABCA7 | 26 | (intron 16 161) | tcccgcagcttttataggcc C/T cggcccagcaggtcccggat | 3712 | | |
| ABCA7 | 27 | (coding region 2385 | caccccatctctgcagtgct G/A gtagaagaggcaccgcccgg | 3713 | | |
| | | (Leu 795 Leu)) | | | | |
| ABCA7 | 28 | (coding region 2421 | cccggcctgagtcctggcgt C/A tccgttcgcagcctggagaa | 3714 | | |
| | | (Val 807 Val)) | | | | |
| ABCA7 | 29 | (intron 20 166) | cgagacagtaagagttgggg A/G tagacagaggttcccctgga | 3715 | | |
| ABCA7 | 30 | (coding region 3027 | ctgctgggagaccgtgtggc C/T gtggtggcaggtggccgctt | 3716 | | |
| | | (Ala 1009 Ala)) | | | | |
| ABCA7 | 31 | (intron 22 1386) | gggtggggcgtgagccgggg C/T tccctgaagcacccccttgt | 3717 | | |
| ABCA7 | 32 | (coding region 3417 | gggtggggcgtgagccgggg C/T tccctgaagcacccctttgt | 3718 | | |
| | | (Leu 1139 Leu)) | | | | |
| ABCA7 | 33 | (intron 23 147) | ggagctctggtggctcagat G/A tcccttgggaaggcctgggg | 3719 | | |
| ABCA7 | 34 | (coding region 3528 | gctggcctagacgtaaccct A/G cggctcaagatgccgccaca | 3720 | | |
| | | (Leu 1176 Leu)) | | | | |
| ABCA7 | 35 | (coding region 4046 | cccagcctgccagtgtagcc G/A gcccggtgcccggcgcctgc | 3721 | | |
| | | (Arg 1349 Gln)) | | | | |
| ABCA7 | 36 | (intron 30 81) | ccccctgggagctctcccgg C/A ccccccggccctcagctccc | 3722 | | |
| ABCA7 | 37 | (intron 32 1) | caaggagcagctgtctgagg G/C tgcactgtgagtccctccac | 3723 | | |
| ABCA7 | 38 | (intron 33 54) | ccactgcttgccactgccct G/A tctggccccttgtaggcagg | 3724 | | |
| ABCA7 | 39 | (intron 34 245) | cagtactttgggaggccgag G/A caggaggactgcttgtggcc | 3725 | | |
| ABCA7 | 40 | (coding region 5057 | ggtgagccggatcttgaaac A/G ggtcttccttatcttccccc | 3726 | | |
| | | (Gln 1686 Arg)) | | | | |
| ABCA7 | 41 | (intron 38 65) | ggcccactcacctttctgaa A/G gacctgcactctcccaggta | 3727 | | |
| ABCA7 | 42 | (intron 40 154) | ctctacctcccacacgcgga C/G caggccctgagacacccctg | 3728 | | |
| ABCA7 | 43 | (intron 40 277) | ctgagcccccggcgccccca T/C ccccagcgtggcccgggaac | 3729 | | |
| ABCA7 | 44 | (coding region 5592 | gtggcccgggaacccagtgc T/C gcgcacctcagcatgggata | 3730 | | |
| | | (Ala 1864 Ala)) | | | | |
| ABCA7 | 45 | (intron 41 286) | ctccttgactctgccttctg T/C ggccctgcccacttgctcct | 3731 | | |
| ABCA7 | 46 | (intron 41 389) | tggccgttcccagtttgcag C/T cgtttcactgcctcttccat | 3732 | | |
| ABCA7 | 47 | (intron 41 991) | cacactatggccctgcccca C/T ac c/t cat c/g cc a/g gctc | 3733 | | |
| ABCA7 | 48 | (intron 41 994) | actatggccctgcccca c/t ac C/T cat c/g cc a/g gctccac | 3734 | | |
| ABCA7 | 49 | (intron 41 998) | tggccctgcccca c/t ac c/t cat C/G cc a/g gctccacccac | 3735 | | |
| ABCA7 | 50 | (intron 41 1001) | ccctgcccca c/t ac c/t cat c/g cc A/G gctccacccacacc | 3736 | | |
| ABCA7 | 51 | (intron 41 1051) | actcatgctggctccaccca C/T accatggccccgccccatac | 3737 | | |
| ABCA7 | 52 | (intron 41 1131) | tgccctgccccatgcccatt A/G tgcccctgctccacactcaa | 3738 | | |
| ABCA7 | 53 | (coding region 5985 | gaagcgctctgctcgcgcct G/A gccatcatggtgaatgggcg | 3739 | | |
| | | (Leu 1995 Leu)) | | | | |
| ABCA7 | 54 | (intron 44 201) | ggcgcaggaccaggaggcgt G/C agccgggggctctgggtgga | 3740 | | |
| ABCA7 | 55 | (intron 44 233) | ctgggtggatttagaagaca C/T aatcaggtgtgcgttggagt | 3741 | | |
| ABCA7 | 56 | (intron 44 313) | agttaggggagggcctggtt A/G gtgggcggggccataggaaa | 3742 | | |
| ABCA7 | 57 | (coding region 6133 | tggcggccgagttccctggg G/T cggagctgcgcgaggcacat | 3743 | | |
| | | (Ala 2045 Ser)) | | | | |
| ABCA7 | 58 | (coding region 6159 | ctgcgcgaggcacatggagg C/T cgcctgcgcttccagctgcc | 3744 | | |
| | | (Gly 2054 Gly)) | | | | |
| ABCA7 | 59 | (intron 45 27) | acggcgccggggtcgggctg G/C gggaggcaggctgggggcca | 3745 | | |
| ABCA7 | 60 | (3′flanking region 108) | caagctgagtgtgcacatac G/A ggccaagtggcgattcatag | 3746 | | |
| ABCA7 | 61 | (3′flanking region 376) | cttacaggagcccggtgtcc C/T ggagcacaggccagggccgg | 3747 | | |
| ABCA7 | 62 | (3′flanking region 687) | cagcagggagacttggggag G/A g/a gggagagagttcacactgc | 3748 | | |
| ABCA7 | 63 | (3′flanking region 688) | agcagggagacttggggag g/a G/A gggagagagttcacactgcg | 3749 | | |
| ABCA7 | 64 | (3′flanking region 1169) | cctcgacctgacccacttca C/T ggggctgcagggcgggtgat | 3750 | | |
| ABCA7 | 65 | (intron 9 398-422) | cgtgaactaccacgtcctgc (T)22-26 aagagatggagtctcactct | 3751 | | |
| ABCA7 | 66 | (intron 12 175-184) | ggggactctgagggtctggt (G)8-10 actctgagggtctgggggcc | 3752 | | |
| ABCA7 | 67 | (intron 30 81-87) | ccccctgggagctctcccgg (C)6-7 ggccctcagctccccttccc | 3753 | | |
| ABCA7 | 68 | (intron 34 349-361) | agaaagagaaagagagaaag (A)12-14 cagaaatgtgctttgggtga | 3754 | | |
| ABCA8 | 1 | (intron 9 204) | ctggtaattaatattagata A/G ataaaaacattgagttagaa | 3755 | | |
| ABCA8 | 2 | (intron 12 266) | aacattatgttgttttaaac A/G taactgagtgtagaaataag | 3756 | | |
| ABCA8 | 3 | (intron 30 733) | ttgccatatgtataataaag T/A attcatgtttttgctagcct | 3757 | | |
| ABCA8 | 4 | (intron 34 861) | agactggagtttgcatgcta C/T ctaagactgtagctgattcc | 3758 | | |
| ABCA8 | 5 | (intron 1 907) | gaggagatcatcctcttggc C/T aatgtctattaacttcgcca | 3759 | | |
| ABCA8 | 6 | (intron 1 1262) | cagaaacttttgccctctct G/A taggctagctcactgtgaaa | 3760 | | |
| ABCA8 | 7 | (intron 1 1537) | agctctcttaaaagtatcca T/C gctgaattttctgcacctta | 3761 | | |
| ABCA8 | 8 | (intron 1 7622) | tcgttaacagcaatgataat T/C tagcccatccttatcc c/t a | 3762 | | |
| ABCA8 | 9 | (intron 1 7639) | t t/c tagcccatccttatcc C/T agaaacaacaggctcataag | 3763 | | |
| ABCA8 | 10 | (intron 1 7720) | tccatgtgttacaaactgcc C/T tggagaacagaaaaagagaa | 3764 | | |
| ABCA8 | 11 | (intron 1 9397) | cataatatatatacatatgc G/A cacacacacacatatacaca | 3765 | | |
| ABCA8 | 12 | (intron 1 9519) | ttgtttgcaggatatttctt T/C ttcttaagaacttcatatta | 3766 | | |
| ABCA8 | 13 | (intron 1 12973) | caattagttttcttcaaaaa A/G gtagaaaagttggaattgta | 3767 | | |
| ABCA8 | 14 | (intron 1 13100) | catataaaaaatcttgatta A/T actttggtatattttaaaaa | 3768 | | |
| ABCA8 | 15 | (intron 1 13128) | gcaatgccttggaactatct C/T ttaaaacacattgactttca | 3769 | | |
| ABCA8 | 16 | (intron 2 420) | caattagttttcttcaaaaa A/G gtagaaaagttggaattgta | 3770 | | |
| ABCA8 | 17 | (intron 2 505) | catataaaaaatcttgatta A/T actttggtatattttaaaaa | 3771 | | |
| ABCA8 | 18 | (intron 2 819) | gcaatgccttggaactatct C/T ttaaaacacattgactttca | 3772 | | |
| ABCA8 | 19 | (intron 3 915) | ttgtgttcgatagatcagta G/A ggtgactagttaacaatgat | 3773 | | |
| ABCA8 | 20 | (intron 3 1539) | aaagggaaatctgtggtgat C/T gccctgtcattcattcatag | 3774 | | |
| ABCA8 | 21 | (intron 3 2341) | ttcctttctttgtcaacttc C/T gtccaaattccactcaagct | 3775 | | |
| ABCA8 | 22 | (intron 3 2882) | tattctatattctgtactcc A/G ttaatattctataataataa | 3776 | | |
| ABCA8 | 23 | (intron 3 3314) | atttaaatatctatctctct A/G tatttaccatttcaaattta | 3777 | | |
| ABCA8 | 24 | (intron 4 89) | gaggttagtatgccaaatta G/A agcatcactatctgtcataa | 3778 | | |
| ABCA8 | 25 | (intron 4 3264) | ttccattggcctattatgcc C/T gtgttatatccagtgttaga | 3779 | | |
| ABCA8 | 26 | (intron 4 3403) | aagagaccaacaaaattctt C/G atcagcagaaaagcacagga | 3780 | | |
| ABCA8 | 27 | (intron 5 389) | gcttactgaatatataaatt G/C agaaaagccatgccaagcaa | 3781 | | |
| ABCA8 | 28 | (intron 5 479) | tgagagtggtgagtaactca A/G aatgcctggactcc g/a aggtc | 3782 | | |
| ABCA8 | 29 | (intron 5 494) | actca a/g aatgcctggactcc G/A aggtcccagcaggtcaatga | 3783 | | |
| ABCA8 | 30 | (coding region 792 | atgggtcttcgggattcagc G/A ttctggtgagtcaaacgcag | 3784 | | |
| | | (Ala 264 Ala)) | | | | |
| ABCA8 | 31 | (intron 6 200) | cctcccaagtagctgggact G/A caggtgccg a/g caccatgcc | 3785 | | |
| ABCA8 | 32 | (intron 6 210) | agctgggact g/a caggtgccg A/G ccaccatgcctggataattt | 3786 | | |
| ABCA8 | 33 | (intron 6 1751) | gtgagttattattgtgttgg C/T tttgcagctgttttgttttt | 3787 | | |
| ABCA8 | 34 | (intron 6 1808) | atttcattatagttttcaaa G/T aatattgtaaaacaaaagaa | 3788 | | |
| ABCA8 | 35 | (intron 6 2412) | tattcctaattctaaagaat T/C ctgcccaaaacttttacctt | 3789 | | |
| ABCA8 | 36 | (intron 6 2506) | tggatgaataagtgaatgaa G/A agttatcttaga a/g tccattt | 3790 | | |
| ABCA8 | 37 | (intron 6 2519) | gaatgaa g/a agttatcttaga A/G tccatttcaggtcttccttt | 3791 | | |
| ABCA8 | 38 | (intron 7 28) | agtgaattaaatatctttcc A/G tccacctatagcctaaaaat | 3792 | | (coding region 991 |
| ABCA8 | 39 | (Gly 331 Ser)) | taaagaaatctttcctcacc G/A gcctggtcgtgttcctcctc | 3793 | | |
| ABCA8 | 40 | (intron 8 74) | tggaatccataggctgtaat C/T atttacaaactcagcattgt | 3794 | | |
| ABCA8 | 41 | (intron 9 1417) | acacatacttaaatatattt T/C ctctgttctacttttgtttt | 3795 | | |
| ABCA8 | 42 | (intron 9 2504) | agaggaaaattatggtttgg G/A aatgaaataaagcagaaata | 3796 | | |
| ABCA8 | 43 | (intron 10 2013) | tggccaaagatctttccaac C/T tgtgccagtggttcacagga | 3797 | | |
| ABCA8 | 44 | (intron 10 2378) | ctgaagaaaattgtcacttt G/A aagtatcttttctttttttc | 3798 | | |
| ABCA8 | 45 | (intron 11 − 697) | aaaaaaaaaaaaaaagagag A/G gagaaagaaaatatttgtta | 3799 | | |
| ABCA8 | 46 | (intron 11 − 528) | tataaaagttagaaaaaaat G/T a a/g tatgttttagaaatagat | 3800 | | |
| ABCA8 | 47 | (intron 11 − 526) | taaaagttagaaaaaaaaat g/t a A/G tatgttttagaaatagat | 3801 | | |
| ABCA8 | 48 | (intron 11 − 342) | ctcaaaggagttttagccat G/A taataacttactattaatct | 3802 | | |
| ABCA8 | 49 | (coding region 1632 | ggttcagtcaccatctataa C/T aataagctttcagaaatggc | 3803 | | |
| | | (Asn 544 Asn)) | | | | |
| ABCA8 | 50 | (intron 14 252) | cttattgcaaaataagtgaa G/A ttgagtttctaagagatcaa | 3804 | | |
| ABCA8 | 51 | (intron 15 130) | ttttgtttttgagacggagt A/C tcgatcatctcggctcactg | 3805 | | |
| ABCA8 | 52 | (intron 16 534) | acatatacattcattcaaat A/G cacattttatggtgacaaca | 3806 | | |
| ABCA8 | 53 | (intron 16 588) | gaatcatcaggaaagtgtta C/T gcaaattctgattagtactt | 3807 | | |
| ABCA8 | 54 | (intron 16 645) | atttaaagaaaatttgtaga C/T gttttaggtggaatgaagaa | 3808 | | |
| ABCA8 | 55 | (intron 17 431) | tgtcaggtttttcttttttt T/A ttctttatgttagaaattgg | 3809 | | |
| ABCA8 | 56 | (intron 17 1390) | gctgtaaactcgttttgtga C/A ttaggtaccccatgattcta | 3810 | | |
| ABCA8 | 57 | (intron 17 2452) | cacgttatacctatagtaac G/A cggaaga g/c tctaatcatgag | 3811 | | |
| ABCA8 | 58 | (intron 17 2460) | acctatagtaac g/a cggaaga G/C tctaatcatgagat g/c ctt | 3812 | | |
| ABCA8 | 59 | (intron 17 2475) | gaaga g/c tctaatcatgagat G/C cttagcagagccaatctcta | 3813 | | |
| ABCA8 | 60 | (intron 18 152) | gaagaagcacaggagagagg C/T agaatcttgacatccaaagg | 3814 | | |
| ABCA8 | 61 | (intron 19 7477) | aaaatctattttgaaagaca C/T ttggaactaaaaaaatcttt | 3815 | | |
| ABCA8 | 62 | (intron 21 196) | ttgtttaaagtaaaataaaa T/C g/c aacaaaacatttttcaaag | 3816 | | |
| ABCA8 | 63 | (intron 21 197) | tgttaaagtaaaataaaa t/c G/C aacaaaaacatttttcaaaga | 3817 | | |
| ABCA8 | 64 | (intron 21 287) | actgtggtggggtgggggga G/T ggggaggggatagcattggg | 3818 | | |
| ABCA8 | 65 | (intron 21 403) | cctgcacaatgtgcacatgt A/G ccctaaaacctaaagtataa | 3819 | | |
| ABCA8 | 66 | (intron 21 1207) | cccagcc g/a gagtgcagtggc A/G ggatcatagctcactgtaac | 3820 | | |
| ABCA8 | 67 | (intron 24 692) | ctcctagatatagacaaaaa A/C caaggtgcacaatggccatg | 3821 | | |
| ABCA8 | 68 | (intron 25 212) | cctgattaatatatgggaag G/A aagggtaaggggtagtggga | 3822 | | |
| ABCA8 | 69 | (intron 26 67) | aataattttcagttctgtac A/G cactgtgaaacttcttttat | 3823 | | |
| ABCA8 | 70 | (intron 27 515) | gtgtctcccaaaccacatca G/T tttcatcttttgctattaca | 3824 | | |
| ABCA8 | 71 | (intron 27 661) | cctggatattatcagactta G/A aatggagaggaaaagtcaat | 3825 | | |
| ABCA8 | 72 | (intron 30 1967) | caaaaattagatacaagggg G/C tgaaattgactttaattgta | 3826 | | |
| ABCA8 | 73 | (intron 31 112) | ctctaaatgctgacccaggt C/G acactgggtagatttacaac | 3827 | | |
| ABCA8 | 74 | (intron 33 401) | cttctcactaggttgtgaga C/T gctgttgttaaattttatgt | 3828 | | |
| ABCA8 | 75 | (intron 35 484) | taacagcatcatcctg a/t tgt A/G tttattttcatagacagaaa | 3829 | | |
| ABCA8 | 76 | (intron 36 258) | tttgcatgtatgttggtaaa A/G cctaagtcaaaactcagtta | 3830 | | |
| ABCA8 | 77 | (intron 36 375) | atattattttactgtcttag C/G ctgtatattaagaaactgac | 3831 | | |
| ABCA8 | 78 | (3′flanking region 674) | gcggtggacatagaaagccc G/A gaagcttcttgatgtgctta | 3832 | | |
| ABCA8 | 79 | (intron 1 56-57) | ttttgcttttgtgtgtgagt TT/Δ gtttcagaggttttgtcttt | 3833 | | |
| ABCA8 | 80 | (intron 1 1180-1191) | taaagtataataataaaacg (A)9-11 gaaattcctcctgtacagag | 3834 | | |
| ABCA8 | 81 | (intron 1 9877-9885) | ctcctgcaaataggtatgac (A)8-12 tcaactgagtacaaaaagct | 3835 | | |
| ABCA8 | 82 | (intron 1 12588) | gtactagagtgcactccttt T/Δ gcaacaggacggccaaagga | 3836 | | |
| ABCA8 | 83 | (intron 6 78) | tcaatgcatctttttttttt T/Δ gaaatggagtctcgctctgt | 3837 | | |
| ABCA8 | 84 | (intron 9 265) | gtatatggtatttttttttt T/Δ gcaacaggacggccaaaaga | 3838 | | |
| ABCA8 | 85 | (intron 9 2666) | attttttttaaaggtatcca A/Δ tagtcattctcaatttcttc | 3839 | | |
| ABCA8 | 86 | (intron 11 − 447) | ggatattctgggtttttttt T/Δ ctacaaactcaagttttttg | 3840 | | |
| ABCA8 | 87 | (intron 15 8407) | gtggaataatttttgactta T/Δ gcatttggtcaaataaaatt | 3841 | | |
| ABCA8 | 88 | (intron 15 9458-9470) | tatgtcgagtaacatatgtc (T)11-15 ctgaatgccagcttgcagtt | 3842 | | |
| ABCA8 | 89 | (intron 16 54-56) | tgaataatagtcatcatcat CAT/Δ aattattatcattacaacta | 3843 | | |
| ABCA8 | 90 | (intron 17 433) | tcaggtttttcttttttttt t/a T/Δ ctttatgttagaaattggac | 3844 | | |
| ABCA8 | 91 | (intron 24 1462) | actccatctcaaaaaaaaaa A/Δ gagagaaaaaaattctgcat | 3845 | | |
| ABCA8 | 92 | (intron 33 155) | caatactttgcaaaaaaaaa A/Δ gatctttccctgatgatatt | 3846 | | |
| ABCA8 | 93 | (intron 34 184) | atactgaatggttttttttt T/Δ ctcctttctcatatgacctc | 3847 | | |
| ABCA8 | 94 | (3′flanking region 1240) | atccttggaccaaaaaaaaa A/Δ ctttatctgtgctttgcgtg | 3848 | | |
| ABCB1 | 1 | 5′flanking − 196 | gctttggagccatagtcatg T/C actcaaaatttattttatct | 3849 | | |
| ABCB1 | 2 | 5′flanking − 16 | tactctttacctgtgaagag T/C agaacatgaagaaatctact | 3850 | | |
| ABCB1 | 3 | intron 1 + 71660 | cttgctggaggaagggtgct A/C gaaaatataccaaatccaag | 3851 | | |
| ABCB1 | 4 | intron 1 + 80091 | gaaataatattcaagttctg A/C aataatatcatgacctatag | 3852 | | |
| ABCB1 | 5 | intron 1 + 103126 | gatatgaatcagaattcatc T/C gtgtctcaagaaaaggtcat | 3853 | | |
| ABCB1 | 6 | intron 1 + 103148 | tgtctcaagaaaaggtcatg C/T gataaattaagttctgctag | 3854 | | |
| ABCB1 | 7 | intron 1 + 108428 | aattaatttatcatcatctg A/G tcaccatttcacacaactca | 3855 | | |
| ABCB1 | 8 | intron 1 + 112042 | cataagttgaaatgtcccca A/G tgattcagctgatgcgcgtt | 3856 | | |
| ABCB1 | 9 | intron 2 + 491 | gctctctggcttcgacgggg G/Δ actagaggttagtctcacct | 3857 | | |
| ABCB1 | 10 | intron 4 + 36 | attaactattcaaaatactt C/T ggaaatttgacatctcctta | 3858 | | |
| ABCB1 | 11 | intron 5 + 1596 | ttagctctcttactgcttca T/C agtggaagaatcaaatactt | 3859 | | |
| ABCB1 | 12 | intron 8 + 1789 | aaacactctgaatattaaac C/T gctcctggaaccacagctca | 3860 | | |
| ABCB1 | 13 | intron 14 + 24 | agttgtccttgccctttgcc T/C ttctagaggtgcaaaaaata | 3861 | | |
| ABCB1 | 14 | intron 14 + 81 | tgcaggaagttaggaaacta C/T tataaatcggaagaagggaa | 3862 | | |
| ABCB1 | 15 | intron 15 + 38 | caaaccaacctgatttataa A/G aaaggaatgctctctgttta | 3863 | | |
| ABCB1 | 16 | intron 17 + 73 | gtttggtgggctagggctac A/G gtaggagtgggaacaagaga | 3864 | | |
| ABCB1 | 17 | intron 18 + 564 | caacagtaaagttacaatct G/A aaaggaatgctctctgttta | 3865 | | |
| ABCB1 | 18 | intron 18 + 2062 | tttccctgaggaatggttat C/T ctctgtgttccttgagtcca | 3866 | | |
| ABCB1 | 19 | intron 18 + 2293 | ccacatcaggttttccccag A/G ggttttagttcctcccctca | 3867 | | |
| ABCB1 | 20 | intron 20 + 557 | aaaaccctaaccattgacac G/A tgtgaatgttttcctgggga | 3868 | | |
| ABCB1 | 21 | intron 21 + 24 | cgtgcctcctttctactggt G/A tttgtcttaattggccattt | 3869 | | |
| ABCB1 | 22 | intron 21 + 2725 | ctgacctgtttttggctgac A/G ggttttagttcctcccctca | 3870 | | |
| ABCB1 | 23 | intron 21 + 4725 | tcttggtattaaaagatcca A/G agagataggaatatgtaatt | 3871 | | |
| ABCB1 | 24 | intron 22 + 8507 | tgcacttaggaaaaaaacaa T/C atggaaatgtgtaaaatata | 3872 | | |
| ABCB1 | 25 | intron 22 + 8537 | tgtaaaatatactttttttt T/A aaaaaaaaggacacatttat | 3873 | | |
| ABCB1 | 26 | intron 22 + 8565 | aggacacatttattcagcat T/C atgatcagactattacattt | 3874 | | |
| ABCB1 | 27 | intron 22 + 8952 | caccttggtttcatggtttg G/A caaagtactggcctgtacca | 3875 | | |
| ABCB1 | 28 | intron 22 + 9520 | caccaacaaatatctttttc A/G cagttgggtgggcatctggt | 3876 | | |
| ABCB1 | 29 | intron 22 + 9836 | agactctgacttagacatga C/T ggcaggggaaagagagactt | 3877 | | |
| ABCB1 | 30 | intron 24 + 377 | taaaatacagatgtgttgta C/A taagttctgcaagcctttgg | 3878 | | |
| ABCB1 | 31 | intron 24 + 1493 | ggggaggtgtccaggcacga A/Δ catggagagctggacttgat | 3879 | | |
| ABCB1 | 32 | intron 24 + 1495 | ggaggtgtccaggcacgaac A/T tggagagctggacttgatac | 3880 | | |
| ABCB1 | 33 | intron 25 + 342 | tgcagccttgatcttctggg C/T tcaagcgatcctcctgcctc | 3881 | | |
| ABCB1 | 34 | intron 26 + 134 | cttggataaagtctgagagc C/G taaatatggtctccaagtgg | 3882 | | |
| ABCB1 | 35 | intron 26 + 1272 | gtccttcaattttgtggtga A/G cttaaaaacaggactctaaa | 3883 | | |
| ABCB1 | 36 | intron 26 + 1394 | tattaagtggtgtgttaaag A/G ttgtgctataatgaattgta | 3884 | | |
| ABCB1 | 37 | intron 26 + (1987-1988) | aagggctggaagagtgaaag (AAAG) gaggctatttgctcccagac | 3885 | | |
| ABCB1 | 37 | intron 26 + (1987-1988) | aagggctggaagagtgaaag gaggctatttgctcccagac | 3886 | | |
| ABCB1 | 38 | intron 27 + 59 | gcagcctctctggcctatag G/T ttgatttataaggggctggt | 3887 | | |
| ABCB1 | 39 | intron 27 + 80 | ttgatttataaggggctggt C/T caatgactgagtcaagaatt | 3888 | | |
| ABCB4 | 1 | exon 3 + 3 | aacacccttattttatagat C/T caatgactgagtcaagaatt | 3889 | | |
| ABCB4 | 2 | intron 3 + 45 | cagcatctctacttatacca T/C gctctgctttaaggttctct | 3890 | | |
| ABCB4 | 3 | intron 3 + 498 | actcaaataggtggtaggag C/T agagacaattcaatacagac | 3891 | | |
| ABCB4 | 4 | intron 3 + 515 | gagcagagacaattcaatac A/G gacagaagtcttagatgaga | 3892 | | |
| ABCB4 | 5 | intron 6 + 1030 | tagttttgccatgtagaatt G/C aaaaagtgatagatggtgtt | 3893 | | |
| ABCB4 | 6 | intron 6 + 1437 | gttaagcctgcttcaatcaa G/A ttagttatattcttgttcta | 3894 | | |
| ABCB4 | 7 | intron 6 + 2449 | ttgacttagcgacactgtta G/A catacttatctttcctgtgt | 3895 | | |
| ABCB4 | 8 | intron 7 + 451 | ccttgctgcacctgtgctgt A/C taagtttggcttattatagt | 3896 | | |
| ABCB4 | 9 | intron 7 + 530 | agtagagacaggctggcgat C/G acaccggacagagctaactg | 3897 | | |
| ABCB4 | 10 | intron 7 + 152 | aacagaatcatgaaattaag T/C tgttaatgatttgaaggcct | 3898 | | |
| ABCB4 | 11 | exon 8 + 40 | aggataaattgtttatgtcg C/T tgttaatgatttgaaggcct | 3899 | | |
| ABCB4 | 12 | intron 8 + 130 | ctggttgactccagatatca T/C agaaggagttgtaaaattct | 3900 | | |
| ABCB4 | 13 | intron 8 + 248 | aatacacaggaagcttctaa A/G taaagtaaggaagtcactct | 3901 | | |
| ABCB4 | 14 | intron 8 + 531 | ctaaagagtgaatggattca A/G tacgtcccttggaactcacc | 3902 | | |
| ABCB4 | 15 | intron 8 + 4240 | ctgaggttccagcttatctc T/A tagagatgtttacttagtct | 3903 | | |
| ABCB4 | 16 | intron 8 + 4343 | tgttagaagaaaaaaaggtt C/T atattacaagagggtctgac | 3904 | | |
| ABCB4 | 17 | intron 8 + 4677 | cccaagatatcttcataact G/C tccatagtgcctagggtgcc | 3905 | | |
| ABCB4 | 18 | intron 9 + 113 | tttacccagattcacctatt A/G ttatcatttttgctcccaaa | 3906 | | |
| ABCB4 | 19 | intron 9 + 982 | tgtcctatacagtttttgtt T/A taagtttagtaaattgatta | 3907 | | |
| ABCB4 | 20 | intron 11 + 241 | gcactttgggaggccaaggt A/G cataaatcacttgaggtcag | 3908 | | |
| ABCB4 | 21 | intron 11 + 457 | tccagcttgggtgacagagt A/G agacttcatctcaaaaaaaa | 3909 | | |
| ABCB4 | 22 | intron 11 + 1337 | tactcttggggagcctatca C/G cagggtgggtcagatatagc | 3910 | | |
| ABCB4 | 23 | exon 12 + 3 | tgtttcttttctgtccagat A/T ctctcggcatttagtgacaa | 3911 | | |
| ABCB4 | 24 | intron 12 + 1288 | cagaccacactaaccctcag T/C tggacctcaggatgtcagtg | 3912 | | |
| ABCB4 | 25 | intron 13 + 206 | tgtggataagaaaatagcat G/A tggttagaccatttgtgaaa | 3913 | | |
| ABCB4 | 26 | intron 13 + 988 | cagtcggtttggaagcttgc T/C accctttcttcacttcctca | 3914 | | |
| ABCB4 | 27 | intron 13 + (1413-1414) | tttatcttcacttatgtttt (T) ctcagttaagttatgctaat | 3915 | | |
| ABCB4 | 27 | intron 13 + (1413-1414) | tttatcttcacttatgtttt ctcagttaagttatgctaat | 3916 | | |
| ABCB4 | 28 | intron 13 + 1931 | cttgcaaatgttgctcttcc A/G caaaaaaaaaaggaaaggat | 3917 | | |
| ABCB4 | 29 | intron 22 + 767 | acagtgggctgatgcataga A/Δ cctgtagcaatccaccagca | 3918 | | |
| ABCB4 | 30 | intron 23 + 784 | agtatctcctaaactcttgc T/C atgcaggaaaaattatttta | 3919 | | |
| ABCB4 | 31 | intron 25 + 158 | gaaatattttactgtattaa T/C gtctagaacttaaatataag | 3920 | | |
| ABCB4 | 32 | intron 25 + 2920 | ctgagtcttcctatacatct T/A ttccattcctcggatgctgt | 3921 | | |
| ABCB4 | 33 | intron 29 + 411 | cttctcttaccttgaattct A/C ggctctcgaactttgacttt | 3922 | | |
| ABCB4 | 34 | 3′flanking + 458 | agaaaatgaaattgccctac T/C gagctaactctgaaagcaca | 3923 | | |
| ABCB7 | 1 | intron 1 + 220 | acggggcaggaggttctggg C/A agaggacacctggagcgctg | 3924 | | |
| ABCB7 | 2 | intron 1 + 480 | agttaactcccttgctgaca G/A gcgtgcttcttgataggcca | 3925 | | |
| ABCB7 | 3 | intron 1 + (512-513) | gataggccaaaaccgtaact AT/Δ ctttccaaaacatagaccgc | 3926 | | |
| ABCB7 | 4 | intron 1 + 1690 | agttctccaataaggcagat G/A aagttaagataaaatttgta | 3927 | | |
| ABCB7 | 5 | intron 1 + 5309 | aattaatatcatttattgct G/A tattgttgtcagtgttatct | 3928 | | |
| ABCB7 | 6 | intron 1 − 11274 | tgcttcttttcaagccagcc A/G gctttaaaaaaaagttagct | 3929 | | |
| ABCB7 | 7 | intron 1 − 11085 | caggttttcagggctcatgt A/G gacctgaagaaaaatgagag | 3930 | | |
| ABCB7 | 8 | intron 1 − 10037 | attctactttctcaacttct T/C ttattacattatctcatcat | 3931 | | |
| ABCB7 | 9 | intron 1 − 21 | ccactctgaaacttccccct G/A ctttttttccttgtcagcag | 3932 | | |
| ABCB7 | 10 | intron 3 + (135-136) | ttctctaatgaaaaaaaaaa (A) catattaattgaccatagtt | 3933 | | |
| ABCB7 | 10 | intron 3 + (135-136) | ttctctaatgaaaaaaaaaa catattaattgaccatagtt | 3934 | | |
| ABCB7 | 11 | intron 3 + 333 | aaaacaatttgtgtgtgtgc G/A tgtgcttcaaggttaatgtt | 3935 | | |
| ABCB7 | 12 | intron 12 + 524 | taaccactctgccctcagta C/T gaaacacagtgccgaaccca | 3936 | | |
| ABCB7 | 13 | intron 13 + 1543 | atcctgtgaggtggggaagc G/A tatggctagcataaatataa | 3937 | | |
| ABCB7 | 14 | intron 13 + 2400 | tgttaccttactgcctcatt C/G tcattcttcccacctgctat | 3938 | | |
| ABCB7 | 15 | intron 15 + 2201 | ctccttcctaaccttagcaa G/C agtctggagatttacttatc | 3939 | | |
| ABCB8 | 1 | 5′flanking − 2272 | ggcttaggcctaagggctga T/C gttggggccagtacccctga | 3940 | | |
| ABCB8 | 2 | 5′flanking − 2070 | agctatgaaaacaagaccct G/A tccttctagaggtagcaaaa | 3941 | | |
| ABCB8 | 3 | intron 1 + 25 | aaacggaaaaacctactcag C/G ccctctgtctccccattcca | 3942 | | |
| ABCB8 | 4 | exon 2 + 308 | tgctggtcctgggggtagcc G/A tcgtggtgaggctttcccca | 3943 | | |
| ABCB8 | 5 | intron 2 + 334 | cccccacttaaaacatttgt C/G ccctctgtctccccattcca | 3944 | | |
| ABCB8 | 6 | intron 4 + 12 | cctgctccggtactgccagc C/T gcagggtgcagagttggggt | 3945 | | |
| ABCB8 | 7 | intron 5 + 547 | agttcatagcattctcgctc G/A gccccctcaggcctgctgct | 3946 | | |
| ABCB8 | 8 | exon 7 + 57 | ggcaatgtgcggactgtgcg A/T gccttcgccatggagcaacg | 3947 | | |
| ABCB8 | 9 | intron 9 + 1231 | tttccgcagctgcatggaca C/T cctcgcgtgccccgtttctg | 3948 | | |
| ABCB8 | 10 | intron 9 + 2164 | cctcttggaggtccttctag C/T gctgcctatgtggagattct | 3949 | | |
| ABCB8 | 11 | intron 9 + 2645 | ttcctgcctggtgcctcccc C/Δ ggctgcctttagcaagtgct | 3950 | | |
| ABCB8 | 12 | intron 9 + 2646 | tcctgcctggtgcctccccc G/A gctgcctttagcaagtgctg | 3951 | | |
| ABCB8 | 13 | intron 9 + 3229 | cagggccgagcagggagtcc G/A tgggtcagctgggctccctt | 3952 | | |
| ABCB8 | 14 | intron 12 + (113-114) | tcctccactgccacaagggg (GG) ccttctttcctgggacaatc | 3953 | | |
| ABCB8 | 14 | intron 12 + (113-114) | tcctccactgccacaagggg ccttctttcctgggacaatc | 3954 | | |
| ABCB8 | 15 | intron 13 + 128 | tgctctcgggagaccctggc C/T gtcttcacatgtcctcagct | 3955 | | |
| ABCB8 | 16 | intron 13 + 305 | atccaggtctagagaagccc A/G tagtggaggtgctgagctgc | 3956 | | |
| ABCB8 | 17 | intron 14 + 135 | acagttgtgtcagggaagac C/G agaaccacagccaaagggga | 3957 | | |
| ABCB8 | 18 | intron 14 + 159 | accacagccaaaggggacag A/T gtcgttgtgtggggacaggg | 3958 | | |
| ABCB8 | 19 | intron 15 + 747 | gttggagccttgggctctgt A/G agggggacagagggaatcat | 3959 | | |
| ABCB8 | 20 | 3′flanking + 333 | cctatcccctggctcacccc G/A ggacccacagtccccatctt | 3960 | | |
| ABCB8 | 21 | 3′flanking + 1168 | ccctctttcaggggtgtgat G/A cagtgcattgatggagcagc | 3961 | | |
| ABCB8 | 22 | 3′flanking + (1719-1721) | tagaccgcaggagccgcgcc GTC/Δ ttcctaacctcgcctcggcc | 3962 | | |
| ABCB9 | 1 | intron 1 + 69 | agggtgccaggccaggcacg G/C gttagggggcgtctgggcac | 3963 | | |
| ABCB9 | 2 | intron 1 + 8873 | tgggcccagcagctggggcc T/C ggaactacctcaaaggcttc | 3964 | | |
| ABCB9 | 3 | intron 1 + 8940 | accagctcagcctgcccagc G/A tgcacacggcaccaagctgg | 3965 | | |
| ABCB9 | 4 | intron 1 + 11410 | agatccaagggatccagagg T/C tggaatgtgaccctccgtgc | 3966 | | |
| ABCB9 | 5 | intron 1 + 12863 | gggaagccagatgcccacaa G/A gctctgtgacttcacttcca | 3967 | | |
| ABCB9 | 6 | intron 1 + 19731 | gccaagtgtcaagatcgagc G/A aggggagggcctgacgaggg | 3968 | | |
| ABCB9 | 7 | intron 1 + 29649 | cagaatccagatgcccgtaa T/C gttgttaagaagcctgcaca | 3969 | | |
| ABCB9 | 8 | intron 1 + 31793 | ggccaggcggggaggggtac C/T ggccagaccggtgggcaaaa | 3970 | | |
| ABCB9 | 9 | intron 1 + 37537 | agagtcacagggttggggtg C/A ccccgggaaggtggcatcta | 3971 | | |
| ABCB9 | 10 | intron 1 + 38293 | taccagccctgtgctttcag G/A gaccatgtgacctgtcaact | 3972 | | |
| ABCB9 | 11 | intron 1 + 44661 | cccgaggtgcctggcttcac A/G gcaggattgccgtcctgcag | 3973 | | |
| ABCB9 | 12 | intron 1 + 49576 | aaagtggccccgtggcttgt C/T ccctgaagccctaaagcacc | 3974 | | |
| ABCB9 | 13 | intron 1 + 64669 | ccacagacaagccgggtagc C/A cacctcgcagctcaacacac | 3975 | | |
| ABCB9 | 14 | exon 2 + 448 | cctggttttgggccctgttc G/A tgtggacgtacatttcactc | 3976 | | |
| ABCB9 | 15 | intron 7 + 3364 | ggtaccaggagtcgggtatc A/G gtgggacaggaacgcgtgtc | 3977 | | |
| ABCB9 | 16 | intron 11 + 113 | gggccccaggagctctccca G/T actatcagcctcctgggctg | 3978 | | |
| ABCB9 | 17 | exon 12 + 370 | cccaggcctgcagcactgaa A/G gacgacctgccatgtcccat | 3979 | | |
| ABCB10 | 1 | 5′flanking − 424 | tcgcgtctgcgcgctccgcc C/T ggtctgccggcgtgagaaag | 3980 | | |
| ABCB10 | 2 | intron 1 + 491 | acaaggggcggttgcgcccc G/T cagcggccggactcccggag | 3981 | | |
| ABCB10 | 3 | intron 1 + 37 | ccacttccctccgccgggcc T/G ctccttctccacacgcgggg | 3982 | | |
| ABCB10 | 4 | intron 1 + 217 | actcgtttgcagattttaca C/T ttgttttcttgttgacacac | 3983 | | |
| ABCB10 | 5 | intron 1 + 405 | gcgtttatactttttttttt T/Δ aaccaaaaacacattatttg | 3984 | | |
| ABCB10 | 6 | exon 3 + 185 | agggccggggcccaggcttc C/T gtaggcatcagtatgatggt | 3985 | | |
| ABCB10 | 7 | intron 6 + 1269 | caaattcacaactgtgcctt C/G cacagaatgggttggaaaac | 3986 | | |
| ABCB10 | 8 | intron 9 + 632 | ccccactccacttgggtgag G/A gcaggtggatggtgatgggt | 3987 | | |
| ABCB10 | 9 | intron 10 + 2373 | tacctcagggcactcagaca G/C cctcaccaatcagaggctca | 3988 | | |
| ABCB10 | 10 | intron 11 + 108 | tccttttcctgttttttgtt T/G ttttttttttcttggagtgg | 3989 | | |
| ABCB10 | 11 | intron 11 + 2379 | cattggtttttagtgtattc T/A gtgttgtgcatccatcatca | 3990 | | |
| ABCB11 | 1 | 5′flanking − (2596-2595) | tgtggtttagagctttctct (TT) gagacatttttgctaaggtt | 3991 | | |
| ABCB11 | 1 | 5′flanking − (2596-2595) | tgtggtttagagctttctct gagacatttttgctaaggtt | 3992 | | |
| ABCB11 | 2 | 5′flanking − 1746 | agctgaagtgaattaagcac G/A atcaactcagtactcacact | 3993 | | |
| ABCB11 | 3 | 5′flanking − (326-314) | agggggaaagtttaaaggta (T)9-12 gtcttgttatgtttttaagt | 3994 | | |
| ABCB11 | 4 | 5′flanking − 135 | agagggtttcccaagcacac T/C ctgtgtttggggttattgct | 3995 | | |
| ABCB11 | 5 | intron 1 + 511 | aaatatagatgcaaaaaaaa A/Δ tgagctgtggatgcatgttt | 3996 | | |
| ABCB11 | 6 | intron 1 + 581 | aatttcagtttttaggtcac C/T caagccagtgggagtcacat | 3997 | | |
| ABCB11 | 7 | intron 1 + (1938-1951) | aaagacgttttaagggcttt (A)10-13 gaaagaaaagaaaactgtag | 3998 | | |
| ABCB11 | 8 | intron 1 + 4517 | aagagatggtctctagcccc CT/Δ gtttgatttggggcacttac | 3999 | | |
| ABCB11 | 9 | intron 1 + 5651 | aaagagaataggttagtgga T/C tagtattcctgtgcttaatg | 4000 | | |
| ABCB11 | 10 | intron 1 + (12200-12201) | aagagatggtctctagcccc CT/Δ gtttgatttggggcacttac | 4001 | | |
| ABCB11 | 11 | intron 1 + 13023 | gtttggctactttgattaaa G/A aagaaagaagagataataat | 4002 | | |
| ABCB11 | 12 | intron 2 + 739 | cctgcatctattctgaccta C/T actggggaaaacagtatgtg | 4003 | | |
| ABCB11 | 13 | intron 2 + (921-922) | tattttgtagttcaaaaagt | 4004 | | |
| | | | (CAGATCTTCTTCAGCTAATTTAGAAATGT) | | | |
| | | | tgctgtccatttgatattca | | | |
| ABCB11 | 13 | intron 2 + (921-922) | tattttgtagttcaaaaagt | 4005 | | |
| | | | tgctgtccatttgatattca | | | |
| ABCB11 | 14 | intron 3 + 644 | agccacacgtttcttattgc G/A tgggaagtttaaaaaatggg | 4006 | | |
| ABCB11 | 15 | intron 3 + 2231 | agtgaacctgagattgagct A/G tactgaaatctctagaagag | 4007 | | |
| ABCB11 | 16 | intron 3 + 2406 | aaagggtggtctttaaatcc T/C tatgtttttctcatcaggtt | 4008 | | |
| ABCB11 | 17 | exon 4 + 10 | tttctcatcaggttacaaga T/C gagaagaaaggtgatggcgt | 4009 | | |
| ABCB11 | 18 | intron 4 + 434 | acaatttatagtatttctca A/G tgccccacacagtttatcta | 4010 | | |
| ABCB11 | 19 | intron 4 + 518 | gtagatgagtagctaaaaac G/T aaagtcagctcctgaaataa | 4011 | | |
| ABCB11 | 20 | exon 5 + 120 | ggcacaatgacagatgtttt T/C attgactacgacgttgagtt | 4012 | | |
| ABCB11 | 21 | intron 5 + 320 | gggaggtgacccatgaattt T/C acttgagtatcatctccaag | 4013 | | |
| ABCB11 | 22 | intron 5 + 16076 | agaagaggtaacagtaagcc T/G cctgatttacagcacacatc | 4014 | | |
| ABCB11 | 23 | intron 6 + 303 | atttgcaggtgtgtttgtag G/C gggcagttgagtagcttgaa | 4015 | | |
| ABCB11 | 24 | intron 7 + 1141 | aaaggattcagcaggcatga A/G gaaagaaaagctttgcaaga | 4016 | | |
| ABCB11 | 25 | intron 8 + 2463 | ccattggctaatagcaatga A/C ctatgacatggtctaactta | 4017 | | |
| ABCB11 | 26 | intron 8 + 2677 | tcaatgatgttacagtgaga A/C tctaatattgtattaaaccc | 4018 | | |
| ABCB11 | 27 | intron 8 + 2699 | ctaatattgtattaaaccca T/A gccacatgttaaatgaatct | 4019 | | |
| ABCB11 | 28 | exon 9 + 24 | gtgtccaagtttacggacta T/C gagctgaaggcctatgccaa | 4020 | | |
| ABCB11 | 29 | intron 9 + 108 | caccttggtctgtggcctcc A/G gaggaagtacttgttcaaga | 4021 | | |
| ABCB11 | 30 | intron 10 + 2475 | taatcattccaaaccacgga C/A tttatttcattaagaacatg | 4022 | | |
| ABCB11 | 31 | intron 10 + 2478 | tcattccaaaccacggactt T/A atttcattaagaacatgata | 4023 | | |
| ABCB11 | 32 | intron 10 + 2711 | tttacagattggaaaagcca C/T tgaagtattgcaggtccaga | 4024 | | |
| ABCB11 | 33 | intron 10 + 3539 | agtgactgtaattagtatca C/G ttgtgcacagagaaaaaatg | 4025 | | |
| ABCB11 | 34 | intron 10 + 3623 | tgcagaaggttgttctttca T/C gaccttcctgagtttcagaa | 4026 | | |
| ABCB11 | 35 | intron 10 + 3661 | gaattcattaataaaaataa A/T cacataatggagcgtgacat | 4027 | | |
| ABCB11 | 36 | intron 10 + 5100 | gggccactctttggcttggc A/G atagactgtggccaatgaaa | 4028 | | |
| ABCB11 | 37 | intron 10 + 5292 | gctatttggtaggaacatct G/A ggcatgatcaggtagccttc | 4029 | | |
| ABCB11 | 38 | intron 10 + 5912 | gagtaatattcagtaaaaaa A/Δ taaagtggtattttaaatca | 4030 | | |
| ABCB11 | 39 | intron 12 + 116 | tgtttccagtaatagggaat G/A gaggtgtctttctctgaaag | 4031 | | |
| ABCB11 | 40 | intron 12 + 326 | gataaatgacaaggcaatta G/C aacaatcaggaagcacaggt | 4032 | | |
| ABCB11 | 41 | intron 12 + 335 | caaggcaattacaacaatca A/G gaagcacaggttcttcccaa | 4033 | | |
| ABCB11 | 42 | intron 12 + 2572 | cctcatccttgccaatgttt C/T cttttactggtttttgatgg | 4034 | | |
| ABCB11 | 43 | exon 13 + 23 | tctaaatgacctcaacatgg T/C cattaaaccaggggaaatga | 4035 | | |
| ABCB11 | 44 | intron 13 + 70 | atggcagtatattgatcaaa C/T agaaaggtgtagcatacatt | 4036 | | |
| ABCB11 | 45 | intron 13 + (1578-1579) | ttattggcctctattttttc (C) tgcccattggtcaagtatga | 4037 | | |
| ABCB11 | 45 | intron 14 + (1578-1579) | ttattggcctctattttttc tgcccattggtcaagtatga | 4038 | | |
| ABCB11 | 46 | intron 14 + 32 | catacattcctgggagaaac C/T aagaggtcatagaaggaaaa | 4039 | | |
| ABCB11 | 47 | intron 14 + 80 | cacaattatacacatttctt C/T tcgtatgattcccaagtcat | 4040 | | |
| ABCB11 | 48 | intron 14 + 439 | tattgtgtcaaaaacaattc A/G ttgtatatctccattctaag | 4041 | | |
| ABCB11 | 49 | intron 14 + (1262-1263) | cagcctttgcattatatttt (T) gctgtgttgtctaacaggag | 4042 | | |
| ABCB11 | 49 | intron 14 + (1262-1263) | cagcctttgcattatatttt gctgtgttgtctaacaggag | 4043 | | |
| ABCB11 | 50 | intron 14 + 1283 | gctgtgttgtctaacaggag A/C aaagagacacggatttgctc | 4044 | | |
| ABCB11 | 51 | intron 14 + 1339 | tgagatagatatttaggacc G/A tgaccaatttttattttggt | 4045 | | |
| ABCB11 | 52 | intron 14 + 1359 | gtgaccaatttttattttgg T/C tgaaaaatcttatttgaagt | 4046 | | |
| ABCB11 | 53 | intron 14 + 1480 | tattgattagacaataaccc G/A tctggggaagggatatttct | 4047 | | |
| ABCB11 | 54 | intron 15 + 370 | ccttttctaatgtctgcaca G/A cctatttaagaatattccca | 4048 | | |
| ABCB11 | 55 | intron 16 + (550-559) | aaagtttagtgtttctatca (T)9-12 gctacttctgatggacttct | 4049 | | |
| ABCB11 | 56 | intron 17 + 188 | tttctctccccaattcatgg T/G tttttggttagcttctcatc | 4050 | | |
| ABCB11 | 57 | intron 17 + 194 | tccccaattcatgggttttt T/G gttagcttctcatcttcttg | 4051 | | |
| ABCB11 | 58 | intron 17 + (197-198) | caattcatgggtttttggtt (T) agcttctcatcttcttgggg | 4052 | | |
| ABCB11 | 58 | intron 17 + (197-198) | caattcatgggtttttggtt agcttctcatcttcttgggg | 4053 | | |
| ABCB11 | 59 | intron 17 + (289-296) | ggggacttcttttaaaaaaa G/A (A)4 tctgtgtttagtgttcctct | 4054 | | |
| ABCB11 | 60 | intron 17 + 1070 | tcagacttgggttttcctat C/T tttcttcttgagaacaagtt | 4055 | | |
| ABCB11 | 61 | intron 17 + 1651 | tgttaaaatatctcattgta T/C atgctgacggatttttcttg | 4056 | | |
| ABCB11 | 62 | intron 17 + 2226 | ccttaagtctcctcctatca T/A gcaccttgttctcaccagct | 4057 | | |
| ABCB11 | 63 | intron 17 + 2979 | ctctctcttcctttctcagc T/Δ ctactatttcactgttggct | 4058 | | |
| ABCB11 | 64 | intron 17 + 3288 | aatccccatatcctacctta T/G ccatctcatccatgaatctt | 4059 | | |
| ABCB11 | 65 | intron 17 + 3289 | atccccatatcctaccttag C/T catctcatccatgaatcttg | 4060 | | |
| ABCB11 | 66 | intron 18 + 97 | aatatgagttttctaggtat A/G tatctagcagtgtttcaagt | 4061 | | |
| ABCB11 | 67 | intron 18 + 98 | atatgagttttctaggtata T/C atctagcagtgtttcaagtc | 4062 | | |
| ABCB11 | 68 | intron 18 + 892 | ctctgaaagttagtgataca C/T cttatttgtgtttgaatcaa | 4063 | | |
| ABCB11 | 69 | intron 18 + 2681 | atgtatgagatcaagtcagg A/G tcaaatattagacacccata | 4064 | | |
| ABCB11 | 70 | intron 18 + 2681 | ggaccatcctgtggggcaat C/G gttccagaaaatgctggtat | 4065 | | |
| ABCB11 | 71 | intron 18 + 5741 | ctcaccggtataaatacaac C/T gtagcaaaggttttcttttt | 4066 | | |
| ABCB11 | 72 | intron 18 + (5582-5883) | tgcgtattccctcagttcag (C) tttttattcaagccacagca | 4067 | | |
| ABCB11 | 72 | intron 18 + (5582-5883) | tgcgtattccctcagttcag tttttattcaagccacagca | 4068 | | |
| ABCB11 | 73 | intron 19 + 10022 | tggctaagttaaaaaaaaaa A/Δ gagattcaactataattgct | 4069 | | |
| ABCB11 | 74 | intron 21 + 322 | caagattcaatactgccccc C/Δ agggggtgggtgaacagggc | 4070 | | |
| ABCB11 | 75 | intron 22 + 257 | ctgttcaatttcctctcgca T/C agtgattcattccacattcc | 4071 | | |
| ABCB11 | 76 | intron 22 + 552 | taattaatatcttgtccttg G/C ggggtaaatgagggatggta | 4072 | | |
| ABCB11 | 77 | intron 22 + 569 | ttggggggtaaatgagggat G/A gtagcataaacacttctcaa | 4073 | | |
| ABCB11 | 78 | 3′flanking + 243 | aaacaccacagaatgacata G/A aactaaaggcggcaggaatc | 4074 | | |
| ABCC1 | 1 | 5′flanking − 1661 | cattcacccttgggggaccc A/G ggccaataaaaaaatcacag | 4075 | | |
| ABCC1 | 2 | intron 2 + 635 | gatgtgccctacctgaccct T/C ggctcggggcagacttgggg | 4076 | | |
| ABCC1 | 3 | intron 2 + 4769 | gggcaggagtggactcaggg G/Δ ttcctggtccaaatgggttc | 4077 | | |
| ABCC1 | 4 | intron 2 + 10069 | tatggaggttttctcttcct T/C tctgtgagttttctctctga | 4078 | | |
| ABCC1 | 5 | intron 2 + (11965-11984) | taaaagccaatcaaatcaac (T)18-20 aaacaagccacgcatttgcc | 4079 | | |
| ABCC1 | 6 | intron 4 + 4302 | cacctgtaatcccagcacct T/G gggaggccaaggcaagtgga | 4080 | | |
| ABCC1 | 7 | intron 4 + 4394 | gtctttactaaaaatacaaa A/C attagctaggcatggtggcg | 4081 | | |
| ABCC1 | 8 | intron 4 + 4524 | ccactgcgctccagcctggg T/C gacaagagtgaaactctgtc | 4082 | | |
| ABCC1 | 9 | intron 6 + 9045 | aggtccttaaactaccctgc G/A ctccaagaatcagtgcctgg | 4083 | | |
| ABCC1 | 10 | intron 7 + (3059-3071) | agtcttttgtatgcaccact (A)11-13 gccatttttcctgcatgacc | 4084 | | |
| ABCC1 | 11 | intron 8 + (886-889) | ttctatgtaacagtaagaaa GAAA/Δ agcagctgccaattaaacaa | 4085 | | |
| ABCC1 | 12 | intron 11 + 198 | tgaattgtcaggttgatgtt C/A tccttggtggcatggcgttt | 4086 | | |
| ABCC1 | 13 | intron 11 + 784 | tgtggattgatccaggagat C/G aagcaatgttgtcagtactc | 4087 | | |
| ABCC1 | 14 | intron 12 + 122 | agccttgcctgccagttgga C/G tcacttggggagccttaaca | 4088 | | |
| ABCC1 | 15 | intron 12 + (3138-3148) | accccatctctattgaaaag (A)10-12 tcaatataaaaaacatttac | 4089 | | |
| ABCC1 | 16 | intron 12 + 3227 | tggtgatgttgagtgatggg C/T tgatcccagggtcgccccag | 4090 | | |
| ABCC1 | 17 | intron 13 + 2060 | tgctcattacaactattcct T/C cttggtcaggttggcaaatt | 4091 | | |
| ABCC1 | 18 | intron 13 + (2061-2062) | ctcattacaactattccttc (C) ttggtcaggttggcaaatta | 4092 | | |
| ABCC1 | 18 | intron 13 + (2061-2062) | ctcattacaactattccttc ttggtcaggttggcaaatta | 4093 | | |
| ABCC1 | 19 | intron 13 + 11776 | gccacctggggagggcccaa G/A cgcgtctccagggcctgtca | 4094 | | |
| ABCC1 | 20 | intron 14 + 179 | aaagaaagaaaacacatttg A/T cttcttgacagagaactcgc | 4095 | | |
| ABCC1 | 21 | intron 16 + 219 | ctagcacagagggttccctg G/T gattgtaagttacagcagcc | 4096 | | |
| ABCC1 | 22 | intron 16 + 310 | ggaagttctactttcaggtg C/T ggtgtgatccagggactctg | 4097 | | |
| ABCC1 | 23 | intron 16 + 890 | ctctccagagaaaacaatct G/T tagaaggcctgcattgaaaa | 4098 | | |
| ABCC1 | 24 | intron 17 + 1171 | aaccccaggctcaaagaagc G/A tgggaaataatgcatactcc | 4099 | | |
| ABCC1 | 25 | intron 17 + 1332 | cacctctttagtgtctgtgc A/G actgcacatttgtctcttgg | 4100 | | |
| ABCC1 | 26 | exon 18 + 53 | gattcagaatgattctctcc G/A agaaaacatcctttttggat | 4101 | | |
| ABCC1 | 27 | intron 19 + (3373-3379) | ccaagctaggcagtctcaca CA/Δ tgtgcactcacgtggccggg | 4102 | | |
| ABCC1 | 28 | intron 20 + 2730 | gcgtgaggtctgtctctcta C/T ccttccgtccaggtgagcaa | 4103 | | |
| ABCC1 | 29 | intron 20 + 3789 | cttggccccagataggttcc G/C cacccccgcctttctttccc | 4104 | | |
| ABCC1 | 30 | intron 20 + 2919 | gatgcaaatgccgcccacca C/T cctggcacctcgtgcgttca | 4105 | | |
| ABCC1 | 31 | intron 20 + 3024 | cttacatcaaactggggcac G/C cacccccgcctttctttccc | 4106 | | |
| ABCC1 | 32 | intron 20 + 9718 | gtggctgcgctcagtgacga A/C caggagaagtgaaggctgag | 4107 | | |
| ABCC1 | 33 | intron 20 + 9733 | gacgaacaggagaagtgaag G/C ctgaggcttataggagggtg | 4108 | | |
| ABCC1 | 34 | intron 20 + (9895-9896) | gctggttcccagtgtcacac AT/Δ gtgtgtgaggacaggctgca | 4109 | | |
| ABCC1 | 35 | intron 20 + 9952 | ggtatcattcttccttcctg G/A gtgatgtggctatttgtgtt | 4110 | | |
| ABCC1 | 36 | intron 20 + 11120 | gcggagtgggggcagtagtc A/G tcatcatcactgagttattg | 4111 | | |
| ABCC1 | 37 | intron 20 + 11147 | tcactgagttattgtgaacc G/A ggaaagagatatgatctgtg | 4112 | | |
| ABCC1 | 38 | intron 20 + (11629-11631) | tattttgaatatcacttctt CTT/Δ tcaatgcttgggaatcacgg | 4113 | | |
| ABCC1 | 39 | intron 20 + 11864 | gagctccagataccacctgc C/T ccacaaccagacagcctgtt | 4114 | | |
| ABCC1 | 40 | intron 21 + 3860 | tggagagtgacatggtgggg G/Δ tgtggtgcatatattcatat | 4115 | | |
| ABCC1 | 41 | intron 22 + 878 | ttaaagatcgtctattttgg G/A caagtgttaataattctcca | 4116 | | |
| ABCC1 | 42 | intron 22 + (4445-4446) | gtggggctggggctggggct (GGGGCT) gggtgcgtgcatgtgctaag | 4117 | | |
| ABCC1 | 42 | intron 22 + (4445-4446) | gtggggctggggctggggct gggtgcgtgcatgtgctaag | 4118 | | |
| ABCC1 | 43 | intron 23 + 62 | gttgtggctttgtctaatta T/C agaaatggatccttagagtc | 4119 | | |
| ABCC1 | 44 | intron 24 + 3171 | aaccatgaggctcaccatat C/T tcaaaccacgctgcacagct | 4120 | | |
| ABCC1 | 45 | intron 24 + (3349-3368) | ctcttgaaattggtgccagc (T)19-22 ccctgcatttaccaaatatg | 4121 | | |
| ABCC1 | 46 | intron 24 + 3369 | tttttttttttttttttttt T/C ccctgcatttaccaaatatg | 4122 | | |
| ABCC1 | 47 | intron 24 + 3584 | ccaaggatttttatttttca A/G caacaaaggaaatgatttta | 4123 | | |
| ABCC1 | 48 | exon 25 + 60 | gagtcggtcagccgctcccc G/A gtctattcccatttcaacga | 4124 | | |
| ABCC1 | 49 | intron 27 + 4539 | tcttttttactcactgcagt G/A tgaggaacaaatcacattta | 4125 | | |
| ABCC1 | 50 | intron 30 + (1708-1714) | gacccaacactatctcctgg (T)6-7 cttccggtcaagtgtcgggc | 4126 | | |
| ABCC1 | 51 | exon 32 + 652 | tggagaaaatcattttctcc C/T cttggcagtgtcccagggcc | 4127 | | |
| ABCC1 | 52 | 3′flanking + 158 | ctgatgctcttccaggacac G/A aaaagaacccatctttgaat | 4128 | | |
| ABCC1 | 53 | 3′flanking + (187-199) | ccatctttgaatatcaatga (T)11-13 aagtactgttccggggagaa | 4129 | | |
| ABCC1 | 54 | 3′flanking + 2227 | cattagaataggtagtatca G/A ccagccgggcatggtggctc | 4130 | | |
| ABCC2 | 1 | exon1+ 77 | catattaatagaagagtctt C/T gttccagacgcagtccagga | 4131 | | |
| ABCC2 | 2 | intron1+ 413 | gataagttctagaactggca A/C ctaatgatatggactagaag | 4132 | | |
| ABCC2 | 3 | intron2+ 192 | atcaaagtggctttgatttt T/G gcataagaatggtgactctt | 4133 | | |
| ABCC2 | 4 | intron2+ 1020 | agtgctgcgattacaagcct G/C agccacctgcacagcctctg | 4134 | | |
| ABCC2 | 5 | intron2+ 3639 | gtcatatcccacccccaaat C/A gacccaataggtacaatgaa | 4135 | | |
| ABCC2 | 6 | intron2+ 3930 | aaaactggcaggagaatttc A/G ctggagctgcatgcaggact | 4136 | | |
| ABCC2 | 7 | intron2+ 3989 | agtgctgcgattacaagcct G/C agccacctgcacagcctctg | 4137 | | |
| ABCC2 | 8 | intron2+ 4078 | aggtttccagatgtgttccc T/C aggcattcctggtggtagga | 4138 | | |
| ABCC2 | 9 | intron2+ 4171 | cttattctttggtcagttgg C/T tttctaccacctcttagctt | 4139 | | |
| ABCC2 | 10 | intron2+ 4257 | gggtattggaaagttcttgc G/A gctgctggaggctgcggtgt | 4140 | | |
| ABCC2 | 11 | intron2+ 4436 | ggactagtggaagaattaga C/G ctttcctgaataaatagatc | 4141 | | |
| ABCC2 | 12 | intron2+ 5227 | taccataatttatgtgtcct A/G tatgacatgaatttcattgg | 4142 | | |
| ABCC2 | 13 | intron2+ 5373 | gttaaggatatgtgaactca A/G gtgtgtctataggataaatt | 4143 | | |
| ABCC2 | 14 | intron2+ 5538 | ttaatgaggttaagcacatg G/T tcatatgtttaaaagccttt | 4144 | | |
| ABCC2 | 15 | intron3+ 772 | ggtataaggcaagatttttt A/T aaaaaattaattgcttaatc | 4145 | | |
| ABCC2 | 16 | intron3+ 1145 | acatccttctcccctcagtc C/T tcggttagtggcagtattct | 4146 | | |
| ABCC2 | 17 | intron7+ 1658 | ggactcttaccagcttagtt G/T cctggttttctaatctaaaa | 4147 | | |
| ABCC2 | 18 | exon10+ 40 | tggccaggaaggagtacacc G/A ttggagaaacagtgaacctg | 4148 | | |
| ABCC2 | 19 | intron11+ 1672 | aactttttaagtcttaagac T/A ggaaggcctgtgtcctaggc | 4149 | | |
| ABCC2 | 20 | intron12+ 148 | ccctctcaccgccccatgcc A/G cttttcctcctttgtaccat | 4150 | | |
| ABCC2 | 21 | intron13+ 180 | catgagttttctgagcccca G/C tttatctaactataaaatga | 4151 | | |
| ABCC2 | 22 | intron13+ 1497 | gtgcagggtccccctgatgc T/C atagccagttcctctttaga | 4152 | | |
| ABCC2 | 23 | intron15+ 169 | atgagctgaaagcaaaggtt T/C tcagccccttcccctgataa | 4153 | | |
| ABCC2 | 24 | intron15+ 949 | ttccaggtgacacatttagt A/G cctaatttgggaaatgttaa | 4154 | | |
| ABCC2 | 25 | intron16+ 984 | tgttaatctagtccaatccc A/C ttagtaagaaaggaggggtc | 4155 | | |
| ABCC2 | 26 | intron19+ 4059 | catcctgatgcacagttatt C/T aaatttaagctccatttgtt | 4156 | | |
| ABCC2 | 27 | intron19+ 10899 | atgtatggagtatttatgga G/A taaagtattccatgctgtat | 4157 | | |
| ABCC2 | 28 | exon22+ 51 | caagcaataggattgttttc G/A atattcttcatcatccttgc | 4158 | | |
| ABCC2 | 29 | intron23+ 56 | tatactgaggatctttctga C/T agggaggaattattatgtcc | 4159 | | |
| ABCC2 | 30 | intron23+ 432 | tggcagtagagcagggtgag G/A aggattattctgcagaggaa | 4160 | | |
| ABCC2 | 31 | intron23+ 734 | tgagccaactactgtactag G/A cactggggcactcaatgaat | 4161 | | |
| ABCC2 | 32 | intron23+ 801 | atgggccagacccaactcac T/G gattttttagtgtatctgag | 4162 | | |
| ABCC2 | 33 | intron26+ 154 | ctggctccatcttttaccca T/C ggacgtattccttactcttc | 4163 | | |
| ABCC2 | 34 | intron27+ 124 | gggtccctaaagtttccttt C/G ctctaactcaaaggacctaa | 4164 | | |
| ABCC2 | 35 | exon28+ 52 | cagattggcccagcaaaggc A/C agatccagtttaacaactac | 4165 | | |
| ABCC2 | 36 | exon28+ 84 | aacaactaccaagtgcggta C/T cgacctgagctggatctggt | 4166 | | |
| ABCC2 | 37 | exon28+ 129 | agagggatcacttgtgacat C/T ggtagcatggagaaggtagg | 4167 | | |
| ABCC2 | 38 | intron29+ 154 | ttccctaggatggacacgtc A/G tttccagaactttgaaatgt | 4168 | | |
| ABCC2 | 39 | intron30+ 91 | gtgttaggtgatgcctggca T/C agaattttcatccaggtctg | 4169 | | |
| ABCC2 | 40 | intron31+ 170 | gccaaaattttacatcacgc A/G aatgaaaacgaacaaggtta | 4170 | | |
| ABCC2 | 41 | 3′flanking + 371 | gtgaatttttattataagct C/T gttctccttaaaactttatc | 4171 | | |
| ABCC3 | 1 | 5′flanking − 1064 | tccttctgagccccaacaag C/T ggtgctgagttggcgtctgg | 4172 | | |
| ABCC3 | 2 | 5′flanking − (827-820) | ctggggcttcacctgtcctt (C)7-8 aaccctgatcaggctgaagc | 4173 | | |
| ABCC3 | 3 | intron 1 + 1226 | tatttgtacatatatgccct T/G tgtgtgtgtacgcacacacg | 4174 | | |
| ABCC3 | 4 | intron 1 + (1389-1399) | aaacttggggcaatggaggt (A)10-12 ctgtaaaaaggcatatttgg | 4175 | | |
| ABCC3 | 5 | intron 1 + 2070 | gcgcacttctccttgatgct C/T gtgagctatacacacctcct | 4176 | | |
| ABCC3 | 6 | intron 1 + 4477 | gcctgtagtccccagacagg G/A ggttttgccattttggcagg | 4177 | | |
| ABCC3 | 7 | intron 1 + 6189 | agtgaccatgaagtctgcca T/C gagggggcctctgccacgtg | 4178 | | |
| ABCC3 | 8 | intron 2 + 268 | ttgtatttttagtagagatg G/A ggttttgccattttggcagg | 4179 | | |
| ABCC3 | 9 | intron 2 + 376 | tgtgcccagccagcattctg G/C ttttaatgaggccctctccc | 4180 | | |
| ABCC3 | 10 | intron 2 + 446 | ctcacctgacctgcttgggg C/T catgggaatctgacaactga | 4181 | | |
| ABCC3 | 11 | intron 8 + 2323 | gaggctggtggtgagagcgt C/G atcgatagggcgtgcagcag | 4182 | | |
| ABCC3 | 12 | intron 12 + 85 | ctcattggactctaccctga C/Δ accacctccacgctgctcag | 4183 | | |
| ABCC3 | 13 | intron 19 + 1581 | ttcttgttgccctttcaatc C/T ccctcattttattttcatgc | 4184 | | |
| ABCC3 | 14 | exon 22 + 180 | aacacttccctgaggctggg C/T gtctatgctgctttaggaat | 4185 | | |
| ABCC3 | 15 | intron 30 + 1979 | cctctgtctgttccatccct C/G tcctaccctcaccccccact | 4186 | | |
| ABCC3 | 16 | intron 30 + 2340 | atgcaccagccaggcctgaa A/C gaatgagtaagagttggagg | 4187 | | |
| ABCC3 | 17 | 3′flanking + (555-558) | ttttcttgagcaagccaaca AAGA/Δ gtttcttttctgcaggtcag | 4188 | | |
| ABCC3 | 18 | 3′flanking + 1455 | aaccccgtatgattagaact G/A tagtgctgtttaggaagcca | 4189 | | |
| ABCC3 | 19 | 3′flanking + (1650-1659) | aattcacagttaacaaagct (A)9-11 tccttgttataaattacaca | 4190 | | |
| ABCC4 | 1 | 5′flanking − 644 | attcatctgggtcatactct C/T gagttacccggctttcttga | 4191 | | |
| ABCC4 | 2 | exon 1 + 67 | ggagcggagcccgcggccac C/T gccgcctgatcagcgcgacc | 4192 | | |
| ABCC4 | 3 | intron 1 + (864-865) | ctttgaccagcttctttccc CT/Δ gtttccaatactttcacttc | 4193 | | |
| ABCC4 | 4 | intron 1 + 21255 | ggatggaaatggtgagcaca A/G accttggcatttaaggaccg | 4194 | | |
| ABCC4 | 5 | intron 1 + 21503 | ctgttttctacccactgggg T/C cagcaaatcagcccctttta | 4195 | | |
| ABCC4 | 6 | intron 1 + 21900 | tgatgctcaaagcaatacaa C/G tagaaaatataggaggctgg | 4196 | | |
| ABCC4 | 7 | intron 1 + 22005 | aagggggagtcatactccag C/T gtgcattttagtttgtgctt | 4197 | | |
| ABCC4 | 8 | intron 1 + (22256-22264) | tttgtgttgttatttgcgtc (T)8-9 cctggaaggaagtgattggc | 4198 | | |
| ABCC4 | 9 | intron 1 + 27784 | ccagggaactggtggcacac C/G ctgagtctgctaggtgggct | 4199 | | |
| ABCC4 | 10 | intron 1 + 27821 | ggctaaagactcacaacctg A/T gggaaggggccaggaaagaa | 4200 | | |
| ABCC4 | 11 | intron 1 + 27837 | cctgagggaaggggccagga A/G agaaaggaagccatggccta | 4201 | | |
| ABCC4 | 12 | intron 1 + 27880 | gggtgttatttgggacccca C/T gcccatccaggccgacagag | 4202 | | |
| ABCC4 | 13 | intron 1 + 40310 | accaagcaggggaggtgaga A/T ttgtgcagactggggatatt | 4203 | | |
| ABCC4 | 14 | intron 1 + 40372 | ttgcttgaataaaaggatgc G/A agtcactgtattggtgaagt | 4204 | | |
| ABCC4 | 15 | intron 1 + 40413 | ttctttcaaatccaattcct G/A actgatttccttgccttcca | 4205 | | |
| ABCC4 | 16 | intron 1 + 40958 | gaagtttaccgaaaaacaaa A/G caagaaactccccagtaaaa | 4206 | | |
| ABCC4 | 17 | intron 1 + 50060 | tgtggctatggggaacatga G/A gctcatagaaactgaagact | 4207 | | |
| ABCC4 | 18 | intron 2 + 181 | gcctgggggaaactcctgtt G/T cctgtgcctccgtagaggtc | 4208 | | |
| ABCC4 | 19 | intron 2 + 254 | gaggtctgtccctctaggtg G/A aagtgttgtggttggaggag | 4209 | | |
| ABCC4 | 20 | intron 2 + 290 | aggaggttgtctggcttatc T/C gtgctactgatggggcttca | 4210 | | |
| ABCC4 | 21 | intron 2 + 543 | ttacgaagctttttcctcat T/C gtaggttctgggataaagaa | 4211 | | |
| ABCC4 | 22 | intron 3 + 557 | ggccttgcacctgggctggc G/A gtggtgccccagaggctgga | 4212 | | |
| ABCC4 | 23 | intron 3 + 718 | gtgtgtcttccttgttgtcg G/A agtggattgctggttggaag | 4213 | | |
| ABCC4 | 24 | intron 3 + 801 | acattccatgaaaaatcaaa G/A acagccagaagggcaataac | 4214 | | |
| ABCC4 | 25 | intron 3 + 1022 | aggggtggatgttgctgttg T/C tacaaaagggtggctttaaa | 4215 | | |
| ABCC4 | 26 | intron 3 + 1471 | tgctggggtgtcccagcgat A/G gtgtttccacatggccccga | 4216 | | |
| ABCC4 | 27 | intron 3 + 1490 | tagtgtttccacatggcccc G/A atcagtttcagttggaaaga | 4217 | | |
| ABCC4 | 28 | intron 3 + (1833-1834) | gggctgccagccacttgggg (G) tggggtctctaacccacaga | 4218 | | |
| ABCC4 | 28 | intron 3 + (1833-1834) | gggctgccagccacttgggg tggggtctctaacccacaga | 4219 | | |
| ABCC4 | 29 | intron 3 + 1870 | cagatggtgactggactaca G/A tgagatttgggtaagctttt | 4220 | | |
| ABCC4 | 30 | intron 3 + 1927 | gaagtagaggctgtagaagc G/A tgaatttctcctgagacttg | 4221 | | |
| ABCC4 | 31 | intron 3 + 1970 | gacaggccccactctggtgc A/T aggagcatggtaatctttac | 4222 | | |
| ABCC4 | 32 | intron 3 + 2039 | gatcgaggggagctttaata T/C gggtacagttggtggagagc | 4223 | | |
| ABCC4 | 33 | intron 3 + (2067-2068) | ttggtggagagctggtcttt (CTTT) tagcggggtggttattgggc | 4224 | | |
| ABCC4 | 33 | intron 3 + (2067-2068) | ttggtggagagctggtcttt tagcgggggtggttattgggc | 4225 | | |
| ABCC4 | 34 | intron 3 + 3563 | cattgactgatggtctgggc G/a gatgtcaagttccctgtttt | 4226 | | |
| ABCC4 | 35 | intron 3 + 3696 | tgcttggcaaggatgaagac C/G ccagatgagtcactagtatg | 4227 | | |
| ABCC4 | 36 | intron 3 + 4093 | aagtaatccttggatttttt T/C ttttcttttccttctagcag | 4228 | | |
| ABCC4 | 37 | intron 3 + 4097 | aatccttggatttttttttt T/Δ cttttccttctagacagtgaa | 4229 | | |
| ABCC4 | 38 | intron 3 + 9724 | aaaaaccagcattactcacc A/G atgagcccatttgcttgact | 4230 | | |
| ABCC4 | 39 | intron 3 + 9988 | aaaggcaaagagcactgagc G/A tctggctgatagcccaggtg | 4231 | | |
| ABCC4 | 40 | intron 3 + 10952 | gttaaaattgcattccctac A/G tcttgttcagaaggtaagcc | 4232 | | |
| ABCC4 | 41 | intron 3 + 11125 | gctcaatttctgctgtgttt A/G atttttgactccacactacc | 4233 | | |
| ABCC4 | 42 | intron 3 + 11244 | ccaagagcctggaatcctcc C/Δ aagtctggttcttttcccca | 4234 | | |
| ABCC4 | 43 | intron 3 + 11916 | gtcttgaccaaaaaaaaaaa A/Δ tttagctctacatgatggtg | 4235 | | |
| ABCC4 | 44 | intron 3 + 12047 | actatactccagcatgggtg A/G cagagcaagcaatatctgaa | 4236 | | |
| ABCC4 | 45 | exon 4 + 205 | tgaggttacgagtagccatg T/G gccatatgatttatcggaag | 4237 | | |
| ABCC4 | 46 | intron 4 + (412-414) | ttatggaaatttttgttgtt GTT/Δ cattaaaaccttcacttaca | 4238 | | |
| ABCC4 | 47 | intron 4 + (9757-9756) | tgacatctgtcatttttttt (T) cctgctgcacaaatctcttc | 4239 | | |
| ABCC4 | 47 | intron 4 + (9757-9756) | tgacatctgtcatttttttt cctgctgcacaaatctcttc | 4240 | | |
| ABCC4 | 48 | intron 4 + 6373 | atgttttgttctagatagta C/G agttttcttgtaatctcaaa | 4241 | | |
| ABCC4 | 49 | intron 4 + 6267 | acttccaccattcacagtat T/C gttcttaatggcatgcggat | 4242 | | |
| ABCC4 | 50 | intron 4 + 6095 | agatccttcatttcctaggg T/C gtacaaatttcaaggctttt | 4243 | | |
| ABCC4 | 51 | intron 4 + 6057 | ttgctatgctagattgattt C/T ctccccaagagttgttaatt | 4244 | | |
| ABCC4 | 52 | intron 4 + 5295 | agttgtctggcttacagtag A/G tgcttactaaatggtagctt | 4245 | | |
| ABCC4 | 53 | intron 4 + 803 | agcttcacctgtttcagccc C/T gcttccatgagcttcacctg | 4246 | | |
| ABCC4 | 54 | intron 4 + 736 | attcagcagcctccacatcc C/T ccttctccgtacttctgtcc | 4247 | | |
| ABCC4 | 55 | intron 4 + 728 | gcctccacatcctccttctc C/T gtacttctgtcctagctagg | 4248 | | |
| ABCC4 | 56 | intron 4 + 624 | ccacccagtgtccctcagtt A/C gaactgtccccagttctctg | 4249 | | |
| ABCC4 | 57 | intron 4 + 470 | ttgatactccatatttgtca C/T ttcccattgaacacattgaa | 4250 | | |
| ABCC4 | 58 | intron 4 + 411 | ggtgaagagactaaggcccc G/A tgtgtttaataatgttgcac | 4251 | | |
| ABCC4 | 59 | intron 4 + 323 | tgttcctctgacagcctctc C/T gttcttccctaatttggctc | 4252 | | |
| ABCC4 | 60 | intron 4 + 246 | gtccttttgtacttgggggc A/G tgtccaaattcattaaatga | 4253 | | |
| ABCC4 | 61 | intron 4 + 199 | agatttttcttcttcctacc C/T ctcgctttgctgtcctgaca | 4254 | | |
| ABCC4 | 62 | intron 5 + 73 | ccttttattctttctggagg C/T aggggctcactctgttcaca | 4255 | | |
| ABCC4 | 63 | intron 5 + 403 | aagggatcacgccttgttgc G/A caggctggtctcaagattct | 4256 | | |
| ABCC4 | 64 | intron 5 + 937 | ccagaatggcttcacctgtg G/C tgggtgcttggctttctgct | 4257 | | |
| ABCC4 | 65 | intron 6 + 150 | ggctcagccaagggggcctc C/T gtccttatgctgaaggcaaa | 4258 | | |
| ABCC4 | 66 | intron 6 + (380-381) | tgtgttagagctgttttcac (AT) gtgtatatatgtgtgttatt | 4259 | | |
| ABCC4 | 66 | intron 7 + (380-381) | tgtgttagagctgttttcac gtgtatatatgtgtgttatt | 4260 | | |
| ABCC4 | 67 | intron 8 + 894 | tttgttgttgttgcccagga A/T ggtctcaaactcctgggttc | 4261 | | |
| ABCC4 | 68 | intron 8 + 82 | tatttagcatcactatgttc C/G agtgtaatgacatttaactc | 4262 | | |
| ABCC4 | 69 | intron 8 + 100 | tccagtgtaatgacatttaa C/T tctctcataaccaaaacgtg | 4263 | | |
| ABCC4 | 70 | intron 8 + 5212 | tcagggaattgtggtccaat A/T tgcagctagggaagaaatcc | 4264 | | |
| ABCC4 | 71 | intron 8 + 5444 | gaaaccttaatttcccctca T/G gtacatagtttctggtggga | 4265 | | |
| ABCC4 | 72 | intron 8 + 8969 | tcaccctcctgagtgactag A/G gaaagtccagctagcccctc | 4266 | | |
| ABCC4 | 73 | intron 8 + 9106 | ccagtgctcaataggtttac T/C gtgtgcatagtttttatttt | 4267 | | |
| ABCC4 | 74 | intron 8 + 9412 | tgtttgtaagtgcaggatgg G/A ggacacatctctgccctgta | 4268 | | |
| ABCC4 | 75 | intron 9 + 116 | tggcttgcttatttactgaa A/G ctatgttacaaagattctca | 4269 | | |
| ABCC4 | 76 | intron 9 + 1384 | cacggcaggaagctgcaccc T/C ggggctggagatgatgtctg | 4270 | | |
| ABCC4 | 77 | intron 9 + 1459 | agatttgggagcagagggcg A/G gggtctcttctgagggtact | 4271 | | |
| ABCC4 | 78 | intron 9 + 1632 | agcagcactcctgcccagcc C/A cactgcctccgtcctcccct | 4272 | | |
| ABCC4 | 79 | intron 9 + 3630 | gtaaatttttcattttgaag G/Δ ttatcttgatctcttattcc | 4273 | | |
| ABCC4 | 80 | intron 9 + 3830 | ggtgttccacccttcaggga C/T gccagattcattttgaagaa | 4274 | | |
| ABCC4 | 81 | intron 9 + 3940 | gagcatttaccaaagtgtgt C/T gtgcagaagaatagccactt | 4275 | | |
| ABCC4 | 82 | intron 10 + 1504 | gggcaaggctgcattgcagt G/A gcttattcttgtctcgagtg | 4276 | | |
| ABCC4 | 83 | intron 11 + 1817 | ttttagggagttgagaaaca G/C atggcaaattttgctagttt | 4277 | | |
| ABCC4 | 84 | intron 11 + 3342 | actggaattattctggcttg T/C aggtacagagattgcatgtg | 4278 | | |
| ABCC4 | 85 | intron 11 + 3377 | catgtgtaatcaaaacctgc T/C ggacagaaatggtcctgagc | 4279 | | |
| ABCC4 | 86 | intron 11 + (3610-3625) | tcctggccaccctcccccgc (A)15-17 gtcctagaggaaaaaatagg | 4280 | | |
| ABCC4 | 87 | intron 11 + 3737 | ataagttcatcgagctaaaa A/G tatatttgagataaaataat | 4281 | | |
| ABCC4 | 88 | intron 11 + 6953 | agagtagagacaaagaaatg C/A caccttgatctgtaagaggg | 4282 | | |
| ABCC4 | 89 | intron 13 + 442 | ctatgacaggttagaagtga G/C gtccttgggaccaacatagg | 4283 | | |
| ABCC4 | 90 | intron 13 + 449 | tgacgtccttgggaccaaca T/C agggctttcttgggaaggct | 4284 | | |
| ABCC4 | 91 | intron 13 + 633 | tgaacacttaaaacccacag G/A catgtaggcctggcttgcct | 4285 | | |
| ABCC4 | 92 | intron 13 + 645 | acccacaggcatgtaggcct G/T gcttgcctttgaaactagtt | 4286 | | |
| ABCC4 | 93 | intron 13 + 3306 | aatgttctcaacgagttaga A/C aattggattgaacaatatgc | 4287 | | |
| ABCC4 | 94 | intron 14 + 252 | taatttagaactttttgttt A/G cctcttccatgacttaattc | 4288 | | |
| ABCC4 | 95 | intron 15 + 124 | tggattctgtggtttcaggg C/T tctattccatgatattggta | 4289 | | |
| ABCC4 | 96 | intron 15 + 1552 | tttggacttctgcctgtttc C/T ccacagctttgtcaacagag | 4290 | | |
| ABCC4 | 97 | intron 16 + 157 | cctactggtgttccatgtcc G/A ttacaaagacctgcgaaaaa | 4291 | | |
| ABCC4 | 98 | intron 17 + 329 | cccaaattgtggttcatttt T/C aaaaaaatgtatttatctaa | 4292 | | |
| ABCC4 | 99 | exon 18 + 56 | atggaggaggaaatgtaacc G/A agaagctagatcttaactgg | 4293 | | |
| ABCC4 | 100 | intron 19 + 7202 | aattaaaaataatgtttttt T/Δ cacataacaatggttatatg | 4294 | | |
| ABCC4 | 101 | intron 19 + 7445 | ttttggcataatttttaatc T/C actagaatgttctgattcat | 4295 | | |
| ABCC4 | 102 | intron 19 + 9018 | tacgtgatggcctgaagaga A/G aaaccgtacattggttcttt | 4296 | | |
| ABCC4 | 103 | intron 19 + 11388 | aagagttcagagattttggg A/G gttggaggaaaaaatagcat | 4297 | | |
| ABCC4 | 104 | intron 19 + 11646 | cattatttttaatttttttt T/Δ cctcctgttggtgtcagaat | 4298 | | |
| ABCC4 | 105 | intron 19 + 13517 | gagaaacttacattattttt A/T aaaaatgctataactagtcc | 4299 | | |
| ABCC4 | 106 | intron 19 + 21033 | tgggagtgccctgggctagc G/A ctgaaacttcaggttttcag | 4300 | | |
| ABCC4 | 107 | intron 19 + 21095 | agacttttggaagaagcaga A/T ctgaaggtaagactgagtaa | 4301 | | |
| ABCC4 | 108 | intron 19 + 21634 | gtgctatttctgagcactca C/T ggccccattgggcatgggct | 4302 | | |
| ABCC4 | 109 | intron 19 + 21715 | tgttttgctcaccccctaca C/T agcttgccctcatgcttctc | 4303 | | |
| ABCC4 | 110 | intron 19 + 23090 | agcaacagacttggagactt G/A agcttctaaaagtttcatta | 4304 | | |
| ABCC4 | 111 | intron 19 + 24297 | cgaatgtgatgaatgtggga A/G cctttttgagatagcagcac | 4305 | | |
| ABCC4 | 112 | intron 19 + 25947 | gagtctaaattaaatatgag C/A aaaactagaaaccatttaaa | 4306 | | |
| ABCC4 | 113 | intron 19 + 30193 | acagatttgcaagagtctac A/C aaagtgataatattctgtca | 4307 | | |
| ABCC4 | 114 | intron 19 + 36938 | aagccgagtcaatctcttgg C/G tatcttctgtggactacttt | 4308 | | |
| ABCC4 | 115 | intron 19 + 37322 | gttcccatgagggctgaccc C/T gcctcacccctggtaaccgc | 4309 | | |
| ABCC4 | 116 | intron 19 + (38361-38362) | cggggttagcttccctagct (T) gcggagggtttctgagaaaa | 4310 | | |
| ABCC4 | 116 | intron 19 + (38361-38362) | cggggttagcttccctagct gcggagggtttctgagaaaa | 4311 | | |
| ABCC4 | 117 | intron 19 + 38746 | taaagacatgctggtaatta T/C gtaaaataaagataagtcaa | 4312 | | |
| ABCC4 | 118 | intron 19 + 42343 | tgtaagggcagaatcagcag C/T aacgattggatgttcccgga | 4313 | | |
| ABCC4 | 119 | intron 19 + 44733 | agcaggctggggaaaaaaaa A/Δ tacagaggttatcattatgt | 4314 | | |
| ABCC4 | 120 | intron 20 + (405-419) | aagggcaaatacttaggcac (T)13-15 ggatagaaccaggtgtggtt | 4315 | | |
| ABCC4 | 121 | intron 20 + (637-648) | ctaagtcttaagctgtcttt (A)12-13 ccaacaatcctacagaaata | 4316 | | |
| ABCC4 | 122 | intron 20 + 842 | caagctggggcacttttttt T/Δ tcccaagtgtttattttgga | 4317 | | |
| ABCC4 | 123 | intron 20 + 843 | aagctggggcactttttttt T/C cccaagtgtttattttggaa | 4318 | | |
| ABCC4 | 124 | intron 20 + 1347 | ggacctctgatttttttttt T/Δ cttttgcaaacatttttaaa | 4319 | | |
| ABCC4 | 125 | intron 20 + (14553-14567) | tccctacacacccctcatct (A)13-15 tcagcagcttgactgagctt | 4320 | | |
| ABCC4 | 126 | intron 20 + 15487 | ggttttttccagtgtgatag C/T acatgtagaaagcagtactg | 4321 | | |
| ABCC4 | 127 | intron 20 + 16161 | gcgttgagtcatgaagccga T/C agtgccgcttgtgcatcgca | 4322 | | |
| ABCC4 | 128 | intron 20 + 30891 | acgtcccccactgttctatc C/T ttctcaagaagcaagcgttg | 4323 | | |
| ABCC4 | 129 | intron 20 + 31180 | ccttgcacgtgctcatacat G/A tcatttgctattgttatcat | 4324 | | |
| ABCC4 | 130 | intron 20 + 31283 | gtgttaaagctaaaaaaaaa A/Δ ccctgttagacattttgact | 4325 | | |
| ABCC4 | 131 | intron 21 + 4204 | ttgaccctgccctgaaaccc A/T gttggagataaaacagtggc | 4326 | | |
| ABCC4 | 132 | intron 22 + 1026 | gtgccctactccacgtaaaa A/C tcttctgtagctcaactgag | 4327 | | |
| ABCC4 | 133 | intron 23 + 377 | gcctggtgcatgaggttgag A/G aaaattctcagcaggagagt | 4328 | | |
| ABCC4 | 134 | intron 25 + 4122 | cccttttgattaaaattgca C/G/T tgggacaagaaccaccccca | 4329 | | |
| ABCC4 | 135 | intron 25 + 6418 | ttgcactgaggtaatggctg C/A agaaattaaagtgagggtat | 4330 | | |
| ABCC4 | 136 | intron 25 + (8765-8775) | tgcatcctgtgatttttttc (T)5-11 aatcctgccgcctggatctc | 4331 | | |
| ABCC4 | 137 | intron 26 + 67 | tatgtttaattgcttttact G/C ttattgctttttttaattgg | 4332 | | |
| ABCC4 | 138 | intron 26 + (101-109) | taattggatgaaaggattgt (T)8-9 cacccaatagagcatgtttt | 4333 | | |
| ABCC4 | 139 | intron 28 + 391 | tagatatgatcttttttttt T/Δ aaatctctattgtgaagtag | 4334 | | |
| ABCC4 | 140 | intron 29 + 2569 | atcctcttttttctaatacg C/T accactatctccacattaaa | 4335 | | |
| ABCC4 | 141 | intron 29 + 7820 | gaaaaacaacctgtgtcctg C/T ttggaggttcagcatattct | 4336 | | |
| ABCC4 | 142 | intron 30 + 6269 | tagatgttctttgggcattg A/G aaagatggtgttatctgttt | 4337 | | |
| ABCC4 | 143 | intron 30 + 6320 | gtttaataaggtttaattag C/T tctactttgttaattacatt | 4338 | | |
| ABCC4 | 144 | intron 30 + 6474 | ctttgatgctatggttttca A/G tccacagatgttcataactt | 4339 | | |
| ABCC4 | 145 | intron 30 + 6519 | ttccactatgaattatattt C/T ctgccattttaacacacctt | 4340 | | |
| ABCC4 | 146 | intron 30 + 6574 | aatggttttggtcctaaatc C/T acactggttcaaaactagac | 4341 | | |
| ABCC4 | 147 | intron 30 + 6680 | aggtgtgtctcctgtatatg A/G cgtggttaggttttactctg | 4342 | | |
| ABCC4 | 148 | intron 30 − 704 | acgtttatcagaaaacctgt A/C tctcttctagttcagctaga | 4343 | | |
| ABCC4 | 149 | intron 30 − 228 | atctatgaatcagagtgatc A/G gaactaaaatggatctacag | 4344 | | |
| ABCC4 | 150 | intron 30 − (14-5) | acattctttttatgcttacc (T)9-10 ctaggtatacttcaaaagaa | 4345 | | |
| ABCC4 | 151 | exon 31 + 146 | agtccgttccgaaggcattt G/T ccactagtttttggactatg | 4346 | | |
| ABCC4 | 152 | 3′flanking + 173 | atttttaaaggagtaggaca A/G agttgtcacaggtttttgtt | 4347 | | |
| ABCC4 | 153 | 3′flanking + (430-440) | tgtaccccttactccccatc (A)10-11 tggatacatggttaaaggat | 4348 | | |
| ABCC4 | 154 | 3′flanking + 556 | aaaggtgctttgatactgaa G/A gacacaaatgtgaccgtcca | 4349 | | |
| ABCC4 | 155 | 3′flanking + 1144 | cctccctgaaattgcatata T/C gtatatagacatgcacacgt | 4350 | | |
| ABCC4 | 156 | 3′flanking + 1426 | tttaggtgactgaaattgca A/T cagtgatcataatgaggttt | 4351 | | |
| ABCC5 | 1 | intron 1 + 628 | ttctgccacacagagccgcg G/C gtggctttgtgtttatcaca | 4352 | | |
| ABCC5 | 2 | intron 1 + 1834 | tgagttccagtgacctcctc C/T gtttcaaactgctcaccgcc | 4353 | | |
| ABCC5 | 3 | intron 1 + 3055 | agaaagtctttaaaaaaaaa A/Δ ccaacctttctattgtatac | 4354 | | |
| ABCC5 | 4 | intron 2 − 20280 | gaatgcatcgctactaagta T/C ttttgtaagttcagacacca | 4355 | | |
| ABCC5 | 5 | intron 2 − 20260 | tttttgtaagttcagacacc A/T tctagaatctgcttgaccgt | 4356 | | |
| ABCC5 | 6 | intron 2 − 19204 | tgaaataaagcattcgcaca C/T ctacccactttcttcgggac | 4357 | | |
| ABCC5 | 7 | intron 2 − 19043 | agaaagtctttaaaaaaaaa A/Δ ccaacctttctattgtatac | 4358 | | |
| ABCC5 | 8 | intron 2 − 18824 | gaatgcatcgctactaagta T/C ttttgtaagttcagacacca | 4359 | | |
| ABCC5 | 9 | intron 2 − 18807 | tttttgtaagttcagacacc A/T tctagaatctgcttgaccgt | 4360 | | |
| ABCC5 | 10 | intron 2 − (18735-18734) | atagaagcttaaactcacaa (A) cacgtactctacatagatga | 4361 | | |
| ABCC5 | 10 | intron 2 − (18735-18734) | atagaagcttaaactcacaa cacgtactctacatagatga | 4362 | | |
| ABCC5 | 11 | intron 2 − 15903 | taccaaagcctgctcatgga G/A gtagaaagcaagactgacat | 4363 | | |
| ABCC5 | 12 | intron 2 − 15901 | ccaaagcctgctcatggagg C/T agaaagcaagactgacatgt | 4364 | | |
| ABCC5 | 13 | intron 2 − 15847 | tggatggaacctcaaaggcc G/A tcttgcccagtccccattta | 4365 | | |
| ABCC5 | 14 | intron 2 − 15605 | aggagacgccacgacactga C/T agctgtacctgacctgaggg | 4366 | | |
| ABCC5 | 15 | intron 2 − 13571 | ccgattgtgccccagatacc G/A ctttatttgaggggtgtgcc | 4367 | | |
| ABCC5 | 16 | intron 2 − 13402 | taccctgctgttgtccggcc G/T ccaggaagggattggattgt | 4368 | | |
| ABCC5 | 17 | intron 2 − 13325 | cccagaggcctccgtgcagg G/C gaaaagcccttggttgccct | 4369 | | |
| ABCC5 | 18 | intron 2 − 7293 | tttgttaggataaaattgca C/T tgagtgcctgttctaaacca | 4370 | | |
| ABCC5 | 19 | intron 5 + 374 | ccgggctggtgagccagcac C/T gggaacataccaagtgcctg | 4371 | | |
| ABCC5 | 20 | intron 5 + (2212-2213) | cgcctcctgcagtgctctct CT/Δ tggtgaatgctaactctgct | 4372 | | |
| ABCC5 | 21 | intron 5 + 3283 | acccagagagagtctgggtt C/T tggaattcagcgtagctacc | 4373 | | |
| ABCC5 | 22 | intron 5 + 3469 | ttggctttcttttgttgtgg C/T tttttgttttatttttgtca | 4374 | | |
| ABCC5 | 23 | intron 7 + 443 | cacttttattaaagacagta C/T gattacataacatttggccc | 4375 | | |
| ABCC5 | 24 | intron 7 + 458 | cagtacgattacataacatt T/G ggcccatcctagcaagcagg | 4376 | | |
| ABCC5 | 25 | intron 9 + 176 | caaaacaaaacaaacaaaca A/G acaaaaaaaaaataccacat | 4377 | | |
| ABCC5 | 26 | intron 9 + 214 | catatggagatgatgctgtg G/T tcctctccttactggacctg | 4378 | | |
| ABCC5 | 27 | intron 10 + 703 | tgtgggctggaattccttga T/C gttgccactgcatagattag | 4379 | | |
| ABCC5 | 28 | intron 10 + 3580 | catggggctggagctgtgaa A/G accagtaggtactggcatgt | 4380 | | |
| ABCC5 | 29 | intron 10 + 3655 | atcctttgaataactcttta G/A gggagagaaatgatggaaat | 4381 | | |
| ABCC5 | 30 | intron 10 + 3854 | gaagtttagaatcatgacac T/C tcggggaagataggatcagg | 4382 | | |
| ABCC5 | 31 | intron 10 + 5040 | ctttgaagacatgagagttt C/T ttggcaagaagatgttctct | 4383 | | |
| ABCC5 | 32 | intron 10 + 5316 | cagttaaatgtcattaggtc C/T gctttaggctggctgagggg | 4384 | | |
| ABCC5 | 33 | intron 12 + 234 | tgactgttgtcccagctgga G/A ccatttggtctcatgccttc | 4385 | | |
| ABCC5 | 34 | intron 12 + 300 | tgccacaggtatgcccgtgt A/G ttgaaaatgtcagagataag | 4386 | | |
| ABCC5 | 35 | intron 12 + 318 | gtattgaaaatgtcagagat A/G agagatgagcagacacccta | 4387 | | |
| ABCC5 | 36 | intron 12 + 1545 | gtagcatccctaaaccaaga C/T aaatgtctactatcagtccc | 4388 | | |
| ABCC5 | 37 | intron 13 + 20 | ggcaaggaatgtttggcttc T/C gtcatgctttccatcttggc | 4389 | | |
| ABCC5 | 38 | intron 14 + 278 | ttctatccagatatttttaa A/G actacaagtaagcgtgtgca | 4390 | | |
| ABCC5 | 39 | intron 16 + 1663 | tgactggagacttttttttt T/Δ aaatattattagatcaattc | 4391 | | |
| ABCC5 | 40 | intron 16 + 1664 | gactggagactttttttttt A/T aatattattagatcaattca | 4392 | | |
| ABCC5 | 41 | intron 17 + 20 | ggtaatggccttttttgaaa T/G ttttagatttgtcatcaaag | 4393 | | |
| ABCC5 | 42 | intron 18 + 232 | ggacacctgcaggctatctg C/T tctcatccgttgtgtattag | 4394 | | |
| ABCC5 | 43 | intron 19 + 249 | ggaccagtaggaacagagcc G/A tccctgggccctgaccactc | 4395 | | |
| ABCC5 | 44 | intron 20 + 846 | ttaaccagaagaaaaaaggc G/A gtggggtggggagacagcca | 4396 | | |
| ABCC5 | 45 | intron 20 + 1154 | tcttgagacgaaaaaaaaaa A/Δ tcagagcatccaggtttcta | 4397 | | |
| ABCC5 | 46 | intron 22 + (1424-1425) | gaggaaatgcagcggaatat (AT) caactctggttttaacaggg | 4398 | | |
| ABCC5 | 46 | intron 22 + (1424-1425) | gaggaaatgcagcggaatat caactctggttttaacaggg | 4399 | | |
| ABCC5 | 47 | intron 24 + 132 | atcccacagaatctccagca A/G tctctcaaccgtgcttggaa | 4400 | | |
| ABCC5 | 48 | intron 24 − 874 | gtgctggagaggttaggatt A/G cggtcagtggtggtacaaag | 4401 | | |
| ABCC5 | 49 | intron 24 − 630 | tgatgataaaaattacccaa G/A cagttatatcacagcatttt | 4402 | | |
| ABCC5 | 50 | intron 24 − 102 | acagggtggcagctacctct G/C tgtggctactatggttgtcc | 4403 | | |
| ABCC5 | 51 | exon 25 + 120 | taccgagaaaacctccctct C/T gtcctaaagaaagtatcctt | 4404 | | |
| ABCC5 | 52 | intron 26 + 263 | ctgggcccagggctctgctc C/T gtgacttcggacaagttatt | 4405 | | |
| ABCC5 | 53 | intron 26 − 3257 | ccgagggtgaattgctgtgt T/C gtctcacactttgggagata | 4406 | | |
| ABCC5 | 54 | intron 27 + 873 | gttttttcctctgctctatc G/A ggattcttctcatttgaaga | 4407 | | |
| ABCC5 | 55 | intron 29 + (2733-2734) | gtgtccaaaggaaggacacg (TGTCCAAAGGAAGGACACG) | 4408 | | |
| | | | cttatgttctccttgtggcc | | | |
| ABCC5 | 55 | intron 29 + (2733-2734) | gtgtccaaaggaaggacacg cttatgttctccttgtggcc | 4409 | | |
| ABCC5 | 56 | intron 29 + 2959 | acatgattttccacggctac A/G tagaagtccatcataggaat | 4410 | | |
| ABCC5 | 57 | intron 29 + 4020 | aataaaaaaataagggggga G/A gtgcacgcagggctagttga | 4411 | | |
| ABCC5 | 58 | exon 30 + 684 | cccctctgccgcctccccac G/A gccgctccaggggtggctgg | 4412 | | |
| ABCC5 | 59 | exon 30 + 947 | agtctatccacagagagtcc C/T actgcctcaggttcctatgg | 4413 | | |
| ABCC5 | 60 | exon 30 + (1145-1160) | tcaccgcagtcgtcgcacag (TC)6-8 ccctcaaagtctgcaacttt | 4414 | | |
| ABCC5 | 61 | 3′flanking + 4 | attattttggattttgtaaa A/C ctcttcgtgtatcaaacaat | 4415 | | |
| ABCC5 | 62 | 3′flanking + 2008 | cccgcagacctggcacagcc C/Δ tgttctcaaaggggagctcc | 4416 | | |
| ABCC5 | 63 | 3′flanking + 2052 | cccagctaggacaggccagc A/G ccaggcagttaggaccgtgg | 4417 | | |
| ABCC7 | 1 | 5′flanking − 834 | gctaaaacactccaaagcct T/G ccttaaaaatgcgcactggg | 4418 | | |
| ABCC7 | 2 | 5′flanking − 729 | cctccttgcagatttttttt T/Δ ctctttcagtacgtgtccta | 4419 | | |
| ABCC7 | 3 | exon 1 + 125 | tagcagggaccccagcgccc G/C agagaccatgcagaggtcgc | 4420 | | |
| ABCC7 | 4 | intron 1 + 6200 | ctatgtgagacgttaagaag G/A tagaggtggccaagaaggaa | 4421 | | |
| ABCC7 | 5 | intron 1 + 7538 | agttctctttcttagcatgg C/A ctacagaggtgcaactacct | 4422 | | |
| ABCC7 | 6 | intron 1 + 13519 | gaaacttaaatcttgagtca T/C acaattgtgtctacatactg | 4423 | | |
| ABCC7 | 7 | intron 1 + 14110 | attacacagtattttttttt T/Δ aattttggggaaagtcgatt | 4424 | | |
| ABCC7 | 8 | intron 1 + 14293 | gccaggcagattcctgactc C/Δ tataacccagagcttatcag | 4425 | | |
| ABCC7 | 9 | intron 1 + 14316 | taacccagagcttatcagag C/G atttatgtccccaaagagaa | 4426 | | |
| ABCC7 | 10 | intron 1 + 14433 | cagaataacaatgatggctc G/A gaaaaatatgggtatttctg | 4427 | | |
| ABCC7 | 11 | intron 1 + 14824 | acgttttgacagttgcacaa G/C tttctttctttaagctttaa | 4428 | | |
| ABCC7 | 12 | intron 1 + 23401 | aatatttttgaaaatcacta C/G ggtatcctgcatagtgattt | 4429 | | |
| ABCC7 | 13 | intron 3 + 879 | gaaaaatttcagttcataca C/A ccccatgaaaaatacattta | 4430 | | |
| ABCC7 | 14 | intron 3 + 922 | acttatcttaacaaagatga G/C tacacttaggcccagaatgt | 4431 | | |
| ABCC7 | 15 | intron 3 + 933 | caaagatgagtacacttagg C/T ccagaatgttctctaatgct | 4432 | | |
| ABCC7 | 16 | intron 3 + 13704 | tttttccaaataaaaaaaaa A/Δ tcaggtgatatctgtaaatg | 4433 | | |
| ABCC7 | 17 | intron 3 + 13758 | tattaaagaacatgatgctt A/C aaacagattagggaaaacta | 4434 | | |
| ABCC7 | 18 | intron 4 + 240 | ctctgttgtagttttttttt T/Δ ctcctaatcatgttatcatt | 4435 | | |
| ABCC7 | 19 | intron 4 + 376 | ttatgttcagcaagaagagt A/G taatatatgattgttaatga | 4436 | | |
| ABCC7 | 20 | intron 4 + 586 | tgtccagacaagagaccaaa T/C tgccgaggcatcatttaggt | 4437 | | |
| ABCC7 | 21 | intron 4 + 1089 | tttcaatctgaacattttac G/A taagtgaagactttgttaga | 4438 | | |
| ABCC7 | 22 | intron 4 + 1615 | aaagttaggtggtattgtat C/T tgtcttcctttctcaatgtt | 4439 | | |
| ABCC7 | 23 | intron 4 + 1946 | aatacaaacaaacttgagct T/C tgcctatacttttcaagaat | 4440 | | |
| ABCC7 | 24 | intron 6 + 783 | tatctaagttttggagtcaa A/G tagcactttgtttgaatccc | 4441 | | |
| ABCC7 | 25 | intron 6 + (1104-1131) | gattgattgattgattgatt (GATT)6-7 tacagagatcagagagctgg | 4442 | | |
| ABCC7 | 26 | intron 7 + (731-732) | gtagcaatgagaccattttt (T) cttcagttgagctccatgtt | 4443 | | |
| ABCC7 | 26 | intron 7 + (731-732) | gtagcaatgagaccattttt cttcagttgagctccatgtt | 4444 | | |
| ABCC7 | 27 | intron 7 + 1434 | gaatgtttggttgtaacctg T/C ataatctggcatgaaattgt | 4445 | | |
| ABCC7 | 28 | intron 8 + 752 | catgctctcttctcagtccc A/G ttccttcattatatcaccta | 4446 | | |
| ABCC7 | 29 | intron 8 + 1109 | tatggccaagacttcagtat G/A cgtggacttaattcttcctt | 4447 | | |
| ABCC7 | 30 | intron 8 + 1312 | atgaagacattcattttttt T/Δ ctccgtccaatgttggatta | 4448 | | |
| ABCC7 | 31 | intron 9 + (6521-6522) | gtgtgtgtgtgtgtgtgtgt (GT) ttttttaacagggatttggg | 4449 | | |
| ABCC7 | 31 | intron 9 + (6521-6522) | gtgtgtgtgtgtgtgtgtgt ttttttaacagggatttggg | 4450 | | |
| ABCC7 | 32 | intron 10 + 2119 | gaacactttatagttttttt T/G ggacaaaagatctagctaaa | 4451 | | |
| ABCC7 | 33 | intron 11 + 3867 | tttttcttcaagaaattaga A/Δ gaggggagaaattggtttaa | 4452 | | |
| ABCC7 | 34 | intron 11 + 11844 | tgaatcaaaatcatctaaaa A/Δ gctttcagaaaccagacttt | 4453 | | |
| ABCC7 | 35 | intron 11 + 12144 | atattaaacagagttacata T/C acttacaacttcatacatat | 4454 | | |
| ABCC7 | 36 | intron 11 + 20975 | gtgtggatagtaaatgccag G/A gtaaatcacatagcatctaa | 4455 | | |
| ABCC7 | 37 | intron 11 + 27057 | atggaagagaagttttagta G/A aggggaggaaggaggaggtg | 4456 | | |
| ABCC7 | 38 | intron 11 + 27131 | gagagagacttttttttttt T/Δ aaggcgagagtttactacct | 4457 | | |
| ABCC7 | 39 | intron 13 + 152 | gtattaactcaaatctgatc T/A gccctactgggccaggattc | 4458 | | |
| ABCC7 | 40 | intron 13 + 287 | tttgcagtatcattgccttg T/C gatatatattactttaatta | 4459 | | |
| ABCC7 | 41 | intron 15 + (85-86) | atacatatatatgcacacac AT/Δ aaatatgtatatatacacat | 4460 | | |
| ABCC7 | 42 | intron 15 + 106 | taaatatgtatatatacaca T/A gtatacatgtataagtatgc | 4461 | | |
| ABCC7 | 43 | intron 15 + 3341 | ggaagtataaatttgtaaat A/C actgagacccaaacttacaa | 4462 | | |
| ABCC7 | 44 | intron 15 + 5556 | tgctattgactaatagtaat A/T attttagggcagctttatga | 4463 | | |
| ABCC7 | 45 | intron 15 + 5919 | tggtagttctatgtggaaac C/A gtgaggaaataattttatat | 4464 | | |
| ABCC7 | 46 | intron 17 + 2479 | caaaaaggtatggaagtcag A/C ggagaaggagacccctatgt | 4465 | | |
| ABCC7 | 47 | intron 18 − 81 | aagtatgcaaaaaaaaaaaa A/Δ gaaataaatcactgacacac | 4466 | | |
| ABCC7 | 48 | intron 19 + 751 | cattaataaaataacaaatc A/G tatctattcaaagaatggca | 4467 | | |
| ABCC7 | 49 | intron 19 + 820 | tgacatttgtgatatgatta T/C tctaatttagtctttttcag | 4468 | | |
| ABCC7 | 50 | intron 21 + 1532 | ttacctttaacttttttttt T/Δ atgccttttactttctctat | 4469 | | |
| ABCC7 | 51 | intron 21 + 1607 | atgcttttggagttgggtct C/T ataaatgtatagaaatgttt | 4470 | | |
| ABCC7 | 52 | intron 21 + 11260 | atgtggaacaatcatgacta T/C atgccttttactttctctat | 4471 | | |
| ABCC7 | 53 | intron 22 + (130-131) | agaatcaatattaaacacac AT/Δ gttttattatatggagtcat | 4472 | | |
| ABCC7 | 54 | intron 23 + 1837 | ctgtcctaaagtttaaaaag A/Δ aaaaaaaaaggaagaaggaa | 4473 | | |
| ABCC7 | 55 | intron 24 + (7100-7112) | cctttacaaactcttagaca (T)12-14 agtttaacatgttacaaaac | 4474 | | |
| ABCC7 | 56 | intron 25 + 237 | actcttcccccttgtcaaca C/T atgatgaagcttttaaatac | 4475 | | |
| ABCC7 | 57 | exon 27 + 115 | gggtgaagctctttccccac C/T ggaactcaagcaagtgcaag | 4476 | | |
| ABCC7 | 58 | exon 27 + 334 | ggatgaattaagtttttttt T/Δ aaaaaagaaacatttggtaa | 4477 | | |
| ABCC8 | 1 | 5′flanking − 1099 | aaaggggctgaaggggtctt T/C cttttgtgttcccctgactg | 4478 | | |
| ABCC8 | 2 | 5′flanking − (424-422) | caccccaccaccaccaccac CAC/Δ aaggtaacgttctgccccac | 4479 | | |
| ABCC8 | 3 | intron 1 + 1212 | agcctgggcaacatagtgag A/G ccccccccgccctttctaca | 4480 | | |
| ABCC8 | 4 | intron 2 + 1003 | aggaggactgtgaatcccag C/A ctgcatgtttgggtcggatt | 4481 | | |
| ABCC8 | 5 | intron 2 + 1253 | catctcactaaggaagaatc C/T agtaaccagcaaggatgaga | 4482 | | |
| ABCC8 | 6 | intron 2 + 1382 | cccagactgcactcctgcag T/C gctgcctggctcctgtagtt | 4483 | | |
| ABCC8 | 7 | intron 2 + 2371 | tttcagagctgtctggaaat T/A tagggggcaggtgggagggg | 4484 | | |
| ABCC8 | 8 | intron 3 + 1957 | ccctacccctagcccagggg C/T ccccacatgagtatgaatgg | 4485 | | |
| ABCC8 | 9 | intron 3 + (2088-2089) | agagaacccttcattaacca (CCA) gggcgtggctgaccagtgtc | 4486 | | |
| ABCC8 | 9 | intron 3 + (2088-2089) | agagaacccttcattaacca gggcgtggctgaccagtgtc | 4487 | | |
| ABCC8 | 10 | intron 3 + 2204 | taaagcacaagttatcaccc G/A tggatggatttgtccttttc | 4488 | | |
| ABCC8 | 11 | intron 3 + 2286 | ttatctccccttgaaaggac A/G ctccacagagccagaaattc | 4489 | | |
| ABCC8 | 12 | intron 3 + 2312 | cagagccagaaattctagaa C/G agggaaaagtggaggggagg | 4490 | | |
| ABCC8 | 13 | intron 3 + 2356 | ctgtgaactgcagggacaga A/G ggaaatgggtattgggagaa | 4491 | | |
| ABCC8 | 14 | intron 3 + 2359 | tgaactgcagggacagaagg A/C aatgggtattgggagaatgg | 4492 | | |
| ABCC8 | 15 | intron 3 + 2370 | gacagaaggaaatgggtatt G/A ggagaatggccagccctcca | 4493 | | |
| ABCC8 | 16 | intron 3 + 2382 | tgggtattgggagaatggcc A/G gccctccaaggggctgatgt | 4494 | | |
| ABCC8 | 17 | intron 3 + 4910 | ggggacagccttcagctgtg G/A aattcctccagtcctagaga | 4495 | | |
| ABCC8 | 18 | intron 3 + 4969 | cattattccagtcctgaggc A/G tgagagcagaaggccgatgc | 4496 | | |
| ABCC8 | 19 | intron 3 + 5003 | ccgatgcttctgccctccat C/G ctaatgtcctcctgcaggga | 4497 | | |
| ABCC8 | 20 | intron 3 + 5019 | ccatcctaatgtcctcctgc A/C gggacccaaggtggatggca | 4498 | | |
| ABCC8 | 21 | intron 4 + 14 | ggtgagggtaagcaggccac C/T tgggccagggtggggtggga | 4499 | | |
| ABCC8 | 22 | intron 4 + 187 | agacactgcatctggcccac G/A tgtgctctaccccagggtcc | 4500 | | |
| ABCC8 | 23 | intron 4 + 204 | cacgtgtgctctaccccagg G/C tcccagagggagaggggggt | 4501 | | |
| ABCC8 | 24 | intron 4 + 254 | gttcgctgaggttggcggat G/A actttccgtagaaagggaag | 4502 | | |
| ABCC8 | 25 | intron 4 + 357 | tgtattcatatcgtcacgct G/C gtaaatgaatgagtaagtgt | 4503 | | |
| ABCC8 | 26 | intron 5 + 92 | ggcattaggtcaaaatcctg G/A tgggacaaaaggggaaactg | 4504 | | |
| ABCC8 | 27 | intron 6 + 4205 | tctgtagaaagtacatgggg C/A catgaagatcattggcttga | 4505 | | |
| ABCC8 | 28 | intron 6 + 5519 | gattcccagggaatgttaaa A/C aggaccgggtcttcctaaac | 4506 | | |
| ABCC8 | 29 | intron 6 + 5575 | tctgacccagtaccagccag G/C ggggcaagtttccatccccc | 4507 | | |
| ABCC8 | 30 | intron 6 + 6587 | gttgccatctgagatcttgc C/T ggaagtacacaagagaccct | 4508 | | |
| ABCC8 | 31 | intron 6 + 6747 | ttccactggccttttctgct C/T agtaattgctacattacagg | 4509 | | |
| ABCC8 | 32 | intron 9 + 191 | gaggaagctgcctcccggtg A/G ggacaggaagcgggcatggc | 4510 | | |
| ABCC8 | 33 | intron 10 + 1963 | cccaggagtccaacctccct T/G tgtccagctagaccatggtg | 4511 | | |
| ABCC8 | 34 | intron 10 + 2724 | cctgggacatgttttcttat A/G taaacagcatcaaaagatgt | 4512 | | |
| ABCC8 | 35 | intron 10 + 2938 | gcccgcccaggactcctcac G/C tgtccaagtcacctagggag | 4513 | | |
| ABCC8 | 36 | intron 10 + 3094 | tccgaggatgtgtttttttt T/Δ ccctccgttagtcagcagtg | 4514 | | |
| ABCC8 | 37 | intron 10 + 3368 | tcctgctcatatgcggcacc A/G tcagacttctgggcaggcaa | 4515 | | |
| ABCC8 | 38 | intron 10 + 8897 | ggtattgattaaaagcctca C/T gggcagagaaattcgccatc | 4516 | | |
| ABCC8 | 39 | intron 11 + 308 | tgtgtattgtagaagtgatg G/A gaaatccagaacagaaagct | 4517 | | |
| ABCC8 | 40 | intron 11 + 1171 | gccctctcatttcccttcca G/A tgctgagcgtttccagtgtg | 4518 | | |
| ABCC8 | 41 | exon 12 + 7 | gcctctgtccacagactttc G/A tgggccacgtcagcttcttc | 4519 | | |
| ABCC8 | 42 | intron 12 + 356 | accaagaatgaggccatccc G/T tccccacgtggctgccccat | 4520 | | |
| ABCC8 | 43 | intron 12 + 934 | tgggttcaaagatggaatgg G/T gcataactcagcaaaattat | 4521 | | |
| ABCC8 | 44 | intron 12 + 1370 | gggagggaggctggacaggg C/G atgaaggcagagcctggtgg | 4522 | | |
| ABCC8 | 45 | intron 15 + 412 | ggaggtgggacccaggatgg C/T gtttcttgggaccacaagga | 4523 | | |
| ABCC8 | 46 | intron 15 + 688 | actcccccggccccactcac A/G tctgccaccttccctccctg | 4524 | | |
| ABCC8 | 47 | intron 16 + 4464 | actcattccaagtattgatc G/A agaagagaggtaggtactgg | 4525 | | |
| ABCC8 | 48 | intron 16 + 4574 | ttgaagatcttaagttgttt T/C ggagagcttactgtgtgctg | 4526 | | |
| ABCC8 | 49 | intron 16 + 5011 | tgcacttgccgcctacttat T/G ccagacccaatgattgggtc | 4527 | | |
| ABCC8 | 50 | intron 16 + 7608 | tatagattaatgaggctctg A/G gtccctcaaaaccttccctc | 4528 | | |
| ABCC8 | 51 | intron 16 + 7730 | cccttacctctccaaaaaac A/G cttgagataccctagaggtg | 4529 | | |
| ABCC8 | 52 | intron 16 + 8369 | ttgcaaactgagttagggcc T/C ggagagcttactgtgtgctg | 4530 | | |
| ABCC8 | 53 | intron 16 + 9708 | tgcacttgccgcctacttat T/G ccagacccaatgattgggtc | 4531 | | |
| ABCC8 | 54 | intron 17 + 651 | tatagattaatgaggctctg A/G gtccctcaaaaccttccctc | 4532 | | |
| ABCC8 | 55 | intron 17 + 692 | cccttacctctccaaaaaac A/G cttgagataccctagaggtg | 4533 | | |
| ABCC8 | 56 | intron 17 + 1541 | ctcaggatcttcctggagga C/T atggttcactcccatgagag | 4534 | | |
| ABCC8 | 57 | intron 18 + 580 | actaagcagatttctaccaa C/T tgcacctccccatccccttg | 4535 | | |
| ABCC8 | 58 | intron 18 + 658 | gaacaagcccctgagaatgc C/T ttccgcaccccctactcccg | 4536 | | |
| ABCC8 | 59 | intron 18 + 660 | acaagcccctgagaatgcct T/C ccgcaccccctactcccgcc | 4537 | | |
| ABCC8 | 60 | intron 19 + 93 | gcccttccatcgatcaccca T/C acccagccatctcactcccc | 4538 | | |
| ABCC8 | 61 | intron 19 + 123 | tctcactccccaggtgctta T/C ctgcactccagcctctccat | 4539 | | |
| ABCC8 | 62 | intron 19 + 219 | cataggggagagggcaggaa C/T ggagggaagggagagagccc | 4540 | | |
| ABCC8 | 63 | intron 19 + 845 | tagtatttaacctgcccaaa C/T gctgtgtgaagtgctgacct | 4541 | | |
| ABCC8 | 64 | intron 20 + 338 | tcccctccacaagcttagac A/G aacaggattctcctgtgact | 4542 | | |
| ABCC8 | 65 | exon 21 + 10 | tttggtgacagggcatcaac C/T tgtctggtggtcaacgccag | 4543 | | |
| ABCC8 | 66 | intron 21 + 192 | caaggatagcacaaatgacc C/Δ attgcagacttcagatggag | 4544 | | |
| ABCC8 | 67 | intron 23 + 17 | gaaggtgggtatatccaggg A/G tggccaagcagccacccctg | 4545 | | |
| ABCC8 | 68 | intron 23 + 67 | gttctgctagaacctgaact C/T ataaaggtcttcctgtcctt | 4546 | | |
| ABCC8 | 69 | intron 26 + 268 | gtgagcgtctgcacatccaa G/C taaagattgttttctcctcc | 4547 | | |
| ABCC8 | 70 | intron 26 + 308 | cgataagtgggtgtaatttg C/T ccatccccacccatgagttc | 4548 | | |
| ABCC8 | 71 | intron 26 + 348 | cagctccctgccctcccctc A/G ctctctctccctcagccagc | 4549 | | |
| ABCC8 | 72 | intron 26 + 807 | gacagctgctgagtcaggcc G/A agccggcagctgagaaaggc | 4550 | | |
| ABCC8 | 73 | intron 26 + 834 | cagctgagaaaggcggcagt G/C gtcagatgggcttgagaaac | 4551 | | |
| ABCC8 | 74 | intron 28 + (118-121) | cctccaaaaaataaaaacaa AAAA/Δ cagaaatgaaggaaatagaa | 4552 | | |
| ABCC8 | 75 | intron 28 + 1348 | tggggtaagcggaagacggg G/A ttgaacgctttgagtttggt | 4553 | | |
| ABCC8 | 76 | intron 29 + 1253 | ctcttagggatcttgtctaa G/T taaagaagagcagagcaaag | 4554 | | |
| ABCC8 | 77 | intron 29 + 1589 | cagatcccagcttcctgtaa A/G cagcctcagatcaggccaaa | 4555 | | |
| ABCC8 | 78 | intron 29 + 2322 | gcgcctcacactcctataac G/A cgcacatgccctgatgcaca | 4556 | | |
| ABCC8 | 79 | intron 29 + 2348 | atgccctgatgcacacacat T/C ttcaacacgcacttactcta | 4557 | | |
| ABCC8 | 80 | intron 29 + 2418 | agacacgtcaccctcccaca C/T gtctccaccctgggggtgtg | 4558 | | |
| ABCC8 | 81 | intron 29 + 2494 | tcagtcccctcagacacatg C/A cctctctccacgcagagaca | 4559 | | |
| ABCC8 | 82 | intron 29 + 2735 | gcggccaaggagagtgatga C/T ggcagcccaggttgatcaga | 4560 | | |
| ABCC8 | 83 | intron 30 + 386 | gctcctggggctccagcctt C/T gcagcccttgtgtgtgtctg | 4561 | | |
| ABCC8 | 84 | intron 33 + 93 | ggcttcgcagtcacctcgtg G/T ccctccagggccgaggcctc | 4562 | | |
| ABCC8 | 85 | intron 33 + 358 | agggacctgggggcagacag C/T gaggccacccttgtattgag | 4563 | | |
| ABCC8 | 86 | intron 38 + 54 | cccagggacaggactggcct G/C ttgtggccgtcatcagtgca | 4564 | | |
| ABCC8 | 87 | intron 38 + 466 | aggacattctggccacatgc C/Δ tcatcctcctcctccaagcc | 4565 | | |
| ABCC8 | 88 | intron 38 + 529 | tggcccccaccgcgggtggt A/G ttcccaccatcctgacccgc | 4566 | | |
| ABCC9 | 1 | intron 3 + 38 | tgttgtttctccttaaagag C/A tatttgtttttccccccaaa | 4567 | | |
| ABCC9 | 2 | intron 3 + 305 | gctggccttctggcttgcag T/A agttgtattttaagaatcag | 4568 | | |
| ABCC9 | 3 | intron 3 + 320 | tgcagaagttgtattttaag A/G atcagagctcttgtgaggag | 4569 | | |
| ABCC9 | 4 | intron 3 + 631 | ttctgtggaaatcagaggct G/C tctaaaatattcctaatttt | 4570 | | |
| ABCC9 | 5 | intron 3 + 8644 | tggacgcactcaacattttc A/G agttattactccttcaactc | 4571 | | |
| ABCC9 | 6 | intron 4 + 757 | aggatatcatgaaacactga A/C tcttagtaaaaactatcttt | 4572 | | |
| ABCD3 | 16 | (intron 9 1493) | tcatcttcttccataggctt A/G ggtgtggagaggagatagaa | 4643 | | |
| ABCD3 | 17 | (intron 13 1534) | tctgttgagttggggatcct A/G tggaaacctcttccttcatc | 4644 | | |
| ABCD3 | 18 | (intron 16 4310) | gaaaagtgaatgctgagtag G/T ttagccaggcttgatttaga | 4645 | | |
| ABCD3 | 19 | (intron 20 273) | ttctaaaagttcagagaaac T/A ctgtagctcattattcctgg | 4646 | | |
| ABCD3 | 20 | (intron 20 1664) | ctcaaaagaaaaaaaaaaaa A/C aaaaaacacatgatccataa | 4647 | | |
| ABCD3 | 21 | (intron 20 6693) | cttaaggtttgtgttttact C/T tgagcaattagtatttccca | 4648 | | |
| ABCD3 | 22 | (intron 21 7171) | atcataaacagagaaataat A/G tcttaaatgagctctgaaaa | 4649 | | |
| ABCD3 | 23 | (intron 22 1220) | ctagaaatcaaaggcattta A/G aatatagccaagcctttatg | 4650 | | |
| ABCD3 | 24 | (intron 22 1358) | agtagcaaaataatcatcac G/A ccagtgatcatgtgaaggag | 4651 | | |
| ABCD3 | 25 | (intron 4 4448-4461) | taactttcttgtagttagcg (T)11-14 aactgttttactttttaggg | 4652 | | |
| ABCD3 | 26 | (intron 5 268) | gttttttggcattttttttt T/Δ aaccttcagtccaggttttc | 4653 | | |
| ABCD3 | 27 | (intron 5 891-902) | ttggtgtaaaacctgtagtg (T)10-13 aacaaatgcaaatatagtgt | 4654 | | |
| ABCD3 | 28 | (intron 7 1226-1227) | gggaatggggggtgtatcta (T) tacaactttccatgtaattt | 4655 | | |
| ABCD3 | 28 | (intron 7 1226-1227) | gggaatggggggtgtatcta tacaactttccatgtaattt | 4656 | | |
| ABCD3 | 29 | (intron 8 1129) | cagatttacttttttttttt T/Δ aatcttgaatacttactagc | 4657 | | |
| ABCD3 | 30 | (intron 13 1595-1596) | tgaaacataataaagcacac (TA) gttatcattaatactttatg | 4658 | | |
| ABCD3 | 30 | (intron 13 1595-1596) | tgaaacataataaagcacac gttatcattaatactttatg | 4659 | | |
| ABCD3 | 31 | (intron 16 7337-7351) | ttaattacttcacagactga (T)13-15 caggttcgatctggggctaa | 4660 | | |
| ABCD3 | 32 | (intron 18 12) | gttcctcaggtaagacctag C/Δ ttgagttatctttgatctaa | 4661 | | |
| ABCD3 | 33 | (intron 20 1652-1670) | gcaagactctgtctcaaaag (A)17-20 cacatgatccataatagagg | 4662 | | |
| ABCD3 | 34 | (intron 20 2262-2273) | ttaatccatttttgtaaatc (T)11-13 accttaaattagcaactatc | 4663 | | |
| ABCD3 | 35 | (3′untranslated region | taaaataaagttgagcttag (T)8-9 aaaaaaaaaacaaagcaaca | 4664 | | |
| | | 2072-2079) | | | | |
| ABCD3 | 36 | (3′untranslated region | gttgagcttagttttttttt (A)10-11 caaagcaacaaattaactag | 4665 | | |
| | | 2080-2091) | | | | |
| ABCD3 | 37 | (3′untranslated region | acttattttctgttcagatt (A)16-19 ctcagatatcctatacaacc | 4666 | | |
| | | 3349-3368) | | | | |
| ABCD4 | 1 | (intron 1 276) | tggcattctttttttgaaaa G/A aagaacctcaggtgcacaaa | 4667 | | |
| ABCD4 | 2 | (intron 1 329) | cttctcagttcttgacaccc T/C gtgggccaatgcaaggctcc | 4668 | | |
| ABCD4 | 3 | (intron 3 171) | ttaagcacgttgatcttgct A/G ttggcccacgtgggactgat | 4669 | | |
| ABCD4 | 4 | (intron 3 449) | cctacccctcattcagtagg G/A gggctaccacctgctcactc | 4670 | | |
| ABCD4 | 5 | (intron 5 273) | gacaggggctacctgagagg G/T aacaggagtcagggctgagg | 4671 | | |
| ABCD4 | 6 | (intron 7 240) | tagtcttagtggcctagcgt G/A gggcctgaaattgtcaaatg | 4672 | | |
| ABCD4 | 7 | (intron 7 267) | gaaattgtcaaatgaatgaa T/C gcctcatcctcttgctggtg | 4673 | | |
| ABCD4 | 8 | (coding region 910 | tctatggagacctgagtccc G/A cagagcttagcaccctggtc | 4674 | | |
| | | (Ala 304 Thr)) | | | | |
| ABCD4 | 9 | (coding region 981 | atcagctgcttcacccagct C/A atcgacctgtccacgacgct | 4675 | | |
| | | (Leu 327 Leu)) | | | | |
| ABCD4 | 10 | (coding region 1102 | gcgagatcctgggcgagagc G/A agtggggcttggacacgtga | 4676 | | |
| | | (Glu 367 Lys)) | | | | |
| ABCD4 | 11 | (intron 13 191) | tggattgggcccactactca T/C agcagctcctgaggcaggta | 4677 | | |
| ABCD4 | 12 | (intron 13 262) | acgcgtatgtcaaacaccca A/G ggtcggattctggggcccct | 4678 | | |
| ABCD4 | 13 | (intron 17 848) | cctctgctcctctggcccat C/G cttctccctgaggcagggct | 4679 | | |
| ABCD4 | 14 | (intron 17 946) | gtgggaggagaagcagcggc G/A gcagagggcagggctttgat | 4680 | | |
| ABCD4 | 15 | (intron 18 41) | ggcctgaggaggagaaagaa C/T ccaaaggctcagcctggcca | 4681 | | |
| ABCD4 | 16 | (3′untranslated region 2 | gcccaggtctaggtttctgt G/A ggggacactgaatctcccag | 4682 | | |
| AGCG1 | 1 | (5′flanking region − 386) | gcaataatcattggctagag G/A tattgtgatatgatgtcatt | 4683 | | |
| AGCG1 | 2 | (intron 1 199) | caccaaatattggtgagctg C/T ctggatttgggagatgcagt | 4684 | | |
| AGCG1 | 3 | (intron 1 291) | acttggggtccggtgtgagg A/C tcctgcactcggtttctgtg | 4685 | | |
| AGCG1 | 4 | (intron 1 318) | actcggtttctgtgatggtg T/A gtgcaggggagtcacaagtt | 4686 | | |
| AGCG1 | 5 | (intron 1 468) | ggtcccaacgggtttctaga T/C ccctccagagaagcctttgg | 4687 | | |
| AGCG1 | 6 | (intron 2 434) | ctgggtacaggttttgttcc G/A gttggtctgctattgagtat | 4688 | | |
| AGCG1 | 7 | (intron 3 1839) | ttaaaatgagttgtttttct C/G ctaaagcctttagggagttg | 4689 | | |
| AGCG1 | 8 | (intron 3 3076) | tttgtcacttccttcgtctc C/T ggctctacttccctgggggt | 4690 | | |
| AGCG1 | 9 | (intron 3 3352) | gttccttggaggaaacgtgg G/A gtacacagtggttccagtta | 4691 | | |
| AGCG1 | 10 | (intron 3 8030) | acagtgaagcacaaggcagc C/T gaagacacagcaggcaggtc | 4692 | | |
| AGCG1 | 11 | (intron 3 8066) | aggtcaggtctgtgtgcaca T/C tggcaggctgc a/g tgcagacc | 4693 | | |
| AGCG1 | 12 | (intron 3 8092) | ggctgc a/g tgcagaccagcct C/T ggcccaggtggagaagcaga | 4694 | | |
| AGCG1 | 13 | (intron 3 8285) | ctggacatgtgactcccctg C/T acccaccctcacaagcacca | 4695 | | |
| AGCG1 | 14 | (intron 3 8860) | cagggtgatagggagtccaa T/C tggacacaggttcagtttgc | 4696 | | |
| AGCG1 | 15 | (intron 4 2319) | gggggtgaacagagggcaga G/A gcctgggcatcttcactcag | 4697 | | |
| AGCG1 | 16 | (intron 4 2557) | gaagggaagaagcagcagca A/G gaaagaagccccctggccct | 4698 | | |
| AGCG1 | 17 | (intron 5 139) | tgacccagggcaccctagag T/A ggcgcccggctccgatcgct | 4699 | | |
| AGCG1 | 18 | (intron 5 177) | gctgcccctgcccctccgcc A/C gggccacctggagcctcggg | 4700 | | |
| AGCG1 | 19 | (intron 6 13) | cagttactgtaagtgctgtt T/C ccaggggtggtca g/a gaatct | 4701 | | |
| AGCG1 | 20 | (intron 6 27) | gctgtt t/c ccaggggtggtca G/A gaatctccctttctggtttt | 4702 | | |
| AGCG1 | 21 | (intron 6 1191) | gctaagcagagttaggcccc G/A gctagtccttgaatgagaga | 4703 | | |
| AGCG1 | 22 | (intron 6 1449) | atgctggagcccctgagttc G/A gtgggcatacaaggggtggc | 4704 | | |
| AGCG1 | 23 | (intron 6 2282) | ctcgcatcacgcagttttca C/T gatcctattaattgggtgag | 4705 | | |
| AGCG1 | 24 | (intron 6 3853) | cctgggcttcagcaggggcc T/C cacacctgcaatgggtg c/t ct | 4706 | | |
| ABCG1 | 25 | (intron 6 381) | cc t/c cacacctgcaatgggtg C/T ctggggagagggtgcagatg | 4707 | | |
| ABCG1 | 26 | (intron 6 4175) | tccaaagcccagatttggtg T/C ttttggggctcttttggaat | 4708 | | |
| ABCG1 | 27 | (intron 7 4) | ctggtggaggaagaaaggta G/A ggagggcggctgctttgtgt | 4709 | | |
| ABCG1 | 28 | (intron 7 576) | agctcaggaggtgtctggaa C/T gccacacagtgcaggagttt | 4710 | | |
| ABCG1 | 29 | (intron 7 1426) | aattctccttctcaacttaa A/G gaaatattttatagaaaaat | 4711 | | |
| ABCG1 | 30 | (intron 7 2342) | agagcctgcaatgggccgcc G/A agggacctgcccatgactca | 4712 | | |
| ABCG1 | 31 | (intron 7 2399) | gaggggttgacagacaggat A/G tgtctg c/g tgtgttccagctg | 4713 | | |
| ABCG1 | 32 | (intron 7 2406) | tgacagacaggat a/g tgtctg C/G tgtgttccagctgctggttt | 4714 | | |
| ABCG1 | 33 | (intron 7 2911) | ccctctctgtgcccactgtt G/C tcccaacaccagcctgttct | 4715 | | |
| ABCG1 | 34 | (intron 7 4363) | tataatagattcctagcaga A/G aacataattgtgagaggaac | 4716 | | |
| ABCG1 | 35 | (intron 7 4752) | gctttcagagcccattcaca C/T aagggtctcattttattagg | 4717 | | |
| ABCG1 | 36 | (intron 7 5026) | ccaggtctgtgggatttcag G/A ccaaaaaggagcgtagcaag | 4718 | | |
| ABCG1 | 37 | (intron 7 5532) | gggttaaatattccgggcag C/T gccaagtcagattatctgta | 4719 | | |
| ABCG1 | 38 | (intron 7 5681) | gctaaagtgcatggaaggca T/C catgaataaatcctttcagg | 4720 | | |
| ABCG1 | 39 | (intron 7 9243) | gcctgagagcgctggcagta G/A gaagggtcgccagtgtggac | 4721 | | |
| ABCG1 | 40 | (intron 7 11371) | gggctctcttggagcccttt T/G tctctcccagccctgcgtct | 4722 | | |
| ABCG1 | 41 | (intron 7 12420) | gggatttcgaatctcaacac T/C ctgagctctgtgctttcccc | 4723 | | |
| ABCG1 | 42 | (intron 7 12985) | ctattggcaggtcgtgaaca T/C tgttcttggatttgcaaata | 4724 | | |
| ABCG1 | 43 | (intron 7 20041) | acatggccggcttcccttct T/C cctc g/a gaatggcctggaatt | 4725 | | |
| ABCG1 | 44 | (intron 7 20046) | gccggcttcccttct t/c cctc G/A gaatggcctggaattcgatc | 4726 | | |
| ABCG1 | 45 | (intron 7 21058) | acaagacttagaatttgacc G/A tgattttaaaactattctaa | 4727 | | |
| ABCG1 | 46 | (intron 7 26189) | ttcttggatgtggccatgca C/T gggggcaagggtttgatgag | 4728 | | |
| ABCG1 | 47 | (intron 7 27453) | atcatgtggtttgggggaaa G/C ctgggaccccacttggtaca | 4729 | | |
| ABCG1 | 48 | (intron 7 29810) | attgtttctcctggttttgt T/C tgtgttgactttccctttaa | 4730 | | |
| ABCG1 | 49 | (intron 10 2116) | aaacagggcttgagtcctcc G/A taagggacaggagaccttcc | 4731 | | |
| ABCG1 | 50 | (intron 13 1196) | tgaaaagaaaatggatgagt G/A gaa a/c ccaaaagagagaaaat | 4732 | | |
| ABCG1 | 51 | (intron 13 1200) | aagaaaatggatgagt g/a gaa A/C ccaaaagagagaaaatgtgg | 4733 | | |
| ABCG1 | 52 | (intron 13 2041) | aagcagaggcttttccaccc G/A gagactcaagaagctgctcc | 4734 | | |
| ABCG1 | 53 | (intron 13 2490) | gtggtgaagtagagctgagc A/T cacgggggagccctccatcc | 4735 | | |
| ABCG1 | 54 | (intron 13 2822) | cagcaggctccgtgctgaag T/C cacagcaagccaggcccttg | 4736 | | |
| ABCG1 | 55 | (intron 13 2850) | agccaggcccttggcctgcc G/A gagctggaagacccagaaca | 4737 | | |
| ABCG1 | 56 | (intron 13 2919) | gcctcccaggagtagctaca C/T gggacccgaaggcagatggc | 4738 | | |
| ABCG1 | 57 | (intron 13 3506) | ggcagcctgggctgccgaga T/C cctccctggagcgcccgccg | 4739 | | |
| ABCG1 | 58 | (intron 13 3538) | cgcccgccgggaagccccag G/A ggggctggagctaca a/g gtgg | 4740 | | |
| ABCG1 | 59 | (intron 13 3554) | ccag g/a ggggctggagctaca A/G gtggccttgcaggttttttg | 4741 | | |
| ABCG1 | 60 | (intron 13 3721) | ccagctcatgggcaggggtg C/T ggagggaaaggcacccacag | 4742 | | |
| ABCG1 | 61 | (intron 13 3921) | gaagaccagcagtcgatgcc A/G gctgggaagagggctctgcc | 4743 | | |
| ABCG1 | 62 | (intron 13 3979) | acccaccagccttttccaga C/T agccttccagaagctgtttc | 4744 | | |
| ABCG1 | 63 | (intron 13 4291) | gagccgctggagtagggtcc G/A cttgctatggctcccagggg | 4745 | | |
| ABCG1 | 64 | (intron 13 4968) | tattgactggacaccttctc C/T gtatggggcactgggctagg | 4746 | | |
| ABCG1 | 65 | (intron 16 672) | atcagtaacgggtcactaac G/A gatgctgctgagtggggcag | 4747 | | |
| ABCG1 | 66 | (intron 16 891) | tggcccactgttgagggtgt G/A ggtgaccagaggggcctgga | 4748 | | |
| ABCG1 | 67 | (intron 18 1616) | ctggaggagaagacaggata A/C agtctaagacgtg c/t tgtcac | 4749 | | |
| ABCG1 | 68 | (intron 18 1630) | aggata a/c agtctaagacgtg C/T tgtcacagagttcagggtcc | 4750 | | |
| ABCG1 | 69 | (intron 18 1674) | gcttccaaaggccgcatccg G/T gttgttctctgagc c/t gagga | 4751 | | |
| ABCG1 | 70 | (intron 18 1689) | atccg g/t gttgttctctgagc C/T gaggacggctttgcgaacgc | 4752 | | |
| ABCG1 | 71 | (intron 19 446) | tggctgacagtgaacacagc G/A gctgcttctccagaacttta | 4753 | | |
| ABCG1 | 72 | (intron 22 243) | acccggagagccatggcagg A/C ccaagtgttctggacgttgc | 4754 | | |
| ABCG1 | 73 | (3′flanking region 1257) | atggggcccacagccctgcc T/C cagaagcagctttggtctcg | 4755 | | |
| ABCG1 | 74 | (3′flanking region 1438) | gggggaagagcttgggaacc A/G tgagggctgttaggctgcaa | 4756 | | |
| ABCG1 | 75 | (3′flanking region 1518) | tgaagggtgaactggagtag G/C tgaggattctgcagttgacg | 4757 | | |
| ABCG1 | 76 | (intron 3 3754-3755) | ctccaccctgcacctccctg (G) cctccttgatttccctcatc | 4758 | | |
| ABCG1 | 76 | (intron 3 3754-3755) | ctccaccctgcacctccctg cctccttgatttccctcatc | 4759 | | |
| ABCG1 | 77 | (intron 3 7848-7854) | cagtttccagaatttggggg (A)6-7 tcccataagctgtcatactt | 4760 | | |
| ABCG1 | 78 | (intron 4 190-191) | tgtcgagagctccccttgcc (C) tggttgatcctcagggttct | 4761 | | |
| ABCG1 | 78 | (intron 4 190-191) | tgtcgagagctccccttgcc tggttgatcctcagggttct | 4762 | | |
| ABCG1 | 79 | (intron 4 198-206) | agctccccttgcctggttga TCCTCAGGG/Δ ttctacttagaatgcct | 4763 | | |
| ABCG1 | 80 | 5′untranslated region | cgcagctcaagcctcgtccc (CGC)8-10 ccccggggcatggcctgtct | 4764 | | |
| | | (−713)-(−741) | | | | |
| ABCG1 | 81 | (intron 6 376-387) | tcttgccttgagctcaagag (A)10-12 tagccaggtttctgcgcatg | 4765 | | |
| ABCG1 | 82 | (intron 7 19944-19945) | ctgatgaggaggggaggggg | 4766 | | |
| | | | (CACCAGGCAGCAGACTCTGATGAGGAGGGGAGGGGG) | | | |
| | | | caccaggcagcagactctga | | | |
| ABCG1 | 82 | (intron 7 19944-19945) | ctgatgaggaggggaggggg | 4767 | | |
| ABCG1 | 83 | (intron 7 25136-25137) | catgaacttgcctgaccata (G) ccctgtgaggagctagggct | 4768 | | |
| ABCG1 | 83 | (intron 7 25136-25137) | catgaacttgcctgaccata ccctgtgaggagctagggct | 4769 | | |
| ABCG2 | 1 | (intron 1 152) | tcatttgaaagtgggtatgc G/A gtttaaaactgacagttcaa | 4770 | | |
| ABCG2 | 2 | (intron 1 614) | agctagtcataaataaatac G/A ccagagtagtaaggaagaga | 4771 | | |
| ABCG2 | 3 | (intron 1 10002) | cctcatgaatggtatacatg T/A cccaacatatctctttcgat | 4772 | | |
| ABCG2 | 4 | (intron 1 10123) | acagtggtccctttgggtgc G/A tatacccaaatccctgcata | 4773 | | |
| ABCG2 | 5 | (intron 1 10768) | ataggaataattgagaacag G/A gtctgaagaactctgcagga | 4774 | | |
| ABCG2 | 6 | (intron 1 10791) | ctgaagaactctgcaggaaa T/C g/a aaaatagttccctgctttt | 4775 | | |
| ABCG2 | 7 | (intron 1 10792) | tgaagaactctgcaggaaa t/c G/A aaaatagttccctgctttta | 4776 | | |
| ABCG2 | 8 | (intron 1 14183) | tcacttaaggctttgcaggg T/G gtctaggacacagaaagaga | 4777 | | |
| ABCG2 | 9 | (intron 1 14934) | aaagtgtctttaaaatttcc A/G tcttgagtcagtgagctatt | 4778 | | |
| ABCG2 | 10 | (intron 1 14955) | tcttgagtcagtgagctatt G/T aaattcaagcaataagttat | 4779 | | |
| ABCG2 | 11 | (intron 1 17251) | ctgtttgggaacagcaactc A/C atcataggcagagagaaagt | 4780 | | |
| ABCG2 | 12 | (intron 1 17347) | atttcaaacctgtttcacaa G/A ttgttaagctcatcttaagg | 4781 | | |
| ABCG2 | 13 | (intron 1 17626) | gaaggtgcataacaacttcc T/G acataaagtctggagctata | 4782 | | |
| ABCG2 | 14 | (intron 1 18369) | ctattgcttttctgtctgca G/T aaagataaaaactctccaga | 4783 | | |
| ABCG2 | 15 | (coding region 34 | atgtcgaagtttttatccca G/A tgtcacaaggaaacaccaat | 4784 | | |
| | | (Val 12 Met)) | | | | |
| ABCG2 | 16 | (intron 2 36) | tgtaaaaagacagcttttta A/G tttacctacagtgaacctca | 4785 | | |
| ABCG2 | 17 | (intron 2 4230) | caaccctaaattggagggcc C/T gggcgtggtgattgagaaag | 4786 | | |
| ABCG2 | 18 | (intron 2 4518) | gttgacagacttttatagtg A/C gggacactgacctgcatgca | 4787 | | |
| ABCG2 | 19 | (intron 2 6278) | atgtatgtaccacgtcttca T/C attcttaaaggatgacccta | 4788 | | |
| ABCG2 | 20 | (intron 3 10) | ggcaaatcttcgtgagtata A/G gagagtataagtaagcgttt | 4789 | | |
| ABCG2 | 21 | (coding region 421 | tgacggtgagagaaaactta C/A agttctcagcagctcttcgg | 4790 | | |
| | | (Gln 141 Lys)) | | | | |
| ABCG2 | 22 | (intron 6 3203) | tcctattctgttttaataaa A/G gcattgaatttaggtttgct | 4791 | | |
| ABCG2 | 23 | (intron 6 3287) | gtcaggctgaactagagcaa A/G caatctaaaggcaagaatag | 4792 | | |
| ABCG2 | 24 | (intron 9 5974) | tatactaataaatggtgtgt A/T taagtttttatctctaattg | 4793 | | |
| ABCG2 | 25 | (intron 10 1908) | gacgcttatgtgcagcctat G/T ttgatgtctggaaaggctga | 4794 | | |
| ABCG2 | 26 | (intron 10 2094) | ccctgagggctgaggtatct G/A gattatttccagacttgcta | 4795 | | |
| ABCG2 | 27 | (intron 11 20) | tgtgagtaggtctttgttct A/G ggaacggggctgtccagcag | 4796 | | |
| ABCG2 | 28 | (intron 11 1447) | tgttcttcaaggaaagcccc C/T gtcaaagaaggaaaagaagc | 4797 | | |
| ABCG2 | 29 | (intron 12 49) | atgtctttagtcttgcctat G/T ggtgaagtcagttgcacctt | 4798 | | |
| ABCG2 | 30 | (intron 12 1566) | tatgcagttacatggacaga C/T acaacattggagaccgaggg | 4799 | | |
| ABCG2 | 31 | (intron 13 40) | gctctgataaggaattgttt C/T tttccttcatttcttcctgc | 4800 | | |
| ABCG2 | 32 | (intron 13 1823) | ttactcaagcaggcctgact C/T ttagtatttgctttttgtag | 4801 | | |
| ABCG2 | 33 | (intron 14 497) | ctaatgaaaacaaacaagaa T/C gaaagattgtcactgtaaat | 4802 | | |
| ABCG2 | 34 | (intron 14 815) | taactctttggaaacttctt A/G aaatttaaaactgtttacct | 4803 | | |
| ABCG2 | 35 | (intron 15 110) | ccaggggcactgaatttttc C/T gagcctacgttttctcatcc | 4804 | | |
| ABCG2 | 36 | (intron 15 566) | gccgcatagtcatgtgttgt T/A gtttttaaattaacttggaa | 4805 | | |
| ABCG2 | 37 | (intron 15 639) | aacaagaaacacttgaataa G/A ttgagaaaaaaccccgtttt | 4806 | | |
| ABCG2 | 38 | (intron 15 1197) | tgagtagctgggattacagg C/T gcccaccaccacacctggct | 4807 | | |
| ABCG2 | 39 | (5′flanking region | gttgggatggctacactcac TCAC/Δ aaagcctgatggcccgtttc | 4808 | | |
| | | (−998)-(−995) | | | | |
| ABCG2 | 40 | (intron 13 405) | ctgctagtttattttttttt T/Δ aactttttaatttatgttt | 4809 | | |
| ABCG2 | 41 | (intron 13 692-702) | tcaatatgtttctgcttatc (T)9-11 aatggttacttaatcctaat | 4810 | | |
| ABCG2 | 42 | (intron 15 645-650) | aaacacttgaataaG/Attgag (A)7-8 ccccgttttcacataatgtt | 4811 | | |
| ABCG4 | 1 | (intron 1 84) | ggcctgggtgtcccatgttc G/A gaaagtcctgcaccagtggg | 4812 | | |
| ABCG4 | 2 | (intron 2 77) | gaacacagaaggtattctga A/G agggcattgacccccatcct | 4813 | | |
| ABCG4 | 3 | (coding region 679 | tggtgtccctcatgaagtcc C/T tggcacaggggggccgtacc | 4814 | | |
| | | (Leu 227 Leu)) | | | | |
| ABCG4 | 4 | (intron 7 95) | ggcctcctaggggtagagat C/T tcaccgtcgcctgccttccc | 4815 | | |
| ABCG4 | 5 | (intron 7 158) | cttgcccttgggaagtgagt G/A tgaatctaaactgagctctc | 4816 | | |
| ABCG4 | 6 | (intron 8 106) | ccccagaggcattgcaacca A/G tgggtgctaggaagaaccta | 4817 | | |
| ABCG4 | 7 | (intron 11 1120) | acgagataagtga t/c ggtcat A/G tggccagggaggaaggggac | 4818 | | |
| ABCG4 | 8 | (intron 11 1173) | gggggacagcttgaacaaga A/G tgtggaggcaggatggacac | 4819 | | |
| ABCG4 | 9 | (3′untranslated region 2) | gagtgacaggcacatacatg A/C gaacaggccatctcagccct | 4820 | | |
| ABCG5 | 1 | (intron 3 40) | ccctggcccccccgcccgcc C/A cgggggcttaggctacactg | 4821 | | |
| ABCG5 | 2 | (intron 4 841) | gcttggaggcatcttgaatg C/T gcctcatccaaactggactg | 4822 | | |
| ABCG5 | 3 | (intron 4 1145) | gagcaaatccagcccacagc G/A tgtaaaat c/a ctgataagtaa | 4823 | | |
| ABCG5 | 4 | (intron 4 1154) | cagcccacagc g/a tgtaaaat C/A ctgataagtaattcagtggg | 4824 | | |
| ABCG5 | 5 | (intron 4 1690) | acagagatgagaaggaggct T/C gggaatctaccctggctggt | 4825 | | |
| ABCG5 | 6 | (intron 4 1806) | tcttttgttccagaatatat T/C tatatctagtttatttatgc | 4826 | | |
| ABCG5 | 7 | (intron 4 1878) | atttcagatatgtccattct C/T tgggtgggtcaaagctacat | 4827 | | |
| ABCG5 | 8 | (intron 4 2052) | gggtgtctggaaacaaaact C/T attaccatatgagtatcttc | 4828 | | |
| ABCG5 | 9 | (intron 4 2108) | tccccctggggtttctgcag A/T tagaggtaatcagtacaggg | 4829 | | |
| ABCG5 | 10 | (intron 4 2230) | agcttcttgattagaaattc G/A gtaaagaattttttttagtc | 4830 | | |
| ABCG5 | 11 | (intron 4 2318) | ggagttacaggctttaagta G/C agcgaagagaattggaagaa | 4831 | | |
| ABCG5 | 12 | (intron 4 2367) | ttaaatgtggctgggggtta C/T aaattgggtccccatttaag | 4832 | | |
| ABCG5 | 13 | (intron 4 2464) | gattatatgtctttgatgtg A/G actcacactgagattgtacc | 4833 | | |
| ABCG5 | 14 | (intron 4 2586) | aaagcatttatgataataaa G/A tttcaaaacccaaacactta | 4834 | | |
| ABCG5 | 15 | (intron 6 1318) | cagagacattcaaagtgcat C/T gctacccttgtgatcacaca | 4835 | | |
| ABCG5 | 16 | (intron 9 164) | caactattgagttaccaaca T/C gttaatatgaatgagctcac | 4836 | | |
| ABCG5 | 17 | (intron 9 365) | gtaccgttagcttctctttg A/G agctgattttaggacagcca | 4837 | | |
| ABCG5 | 18 | (intron 10 64) | tcatggagctagtgggactc G/A tgcagggagagctccagggt | 4838 | | |
| ABCG5 | 19 | (intron 10 2406) | tcaacaagcctgcttactgc G/A gttagttgtgaccattgtct | 4839 | | |
| ABCG5 | 20 | (intron 10 2442) | tgtctaagtaatttaatgtt T/G tcctatgagagctgaaggag | 4840 | | |
| ABCG5 | 21 | (intron 11 4150) | aaggccctgaaatggctgtt G/T ctggctattgttccgagctc | 4841 | | |
| ABCG5 | 22 | (intron 11 4623) | caaacagaaagaattttata C/T cttttgattgacagaaaata | 4842 | | |
| ABCG5 | 23 | (intron 11 4737) | attttcacaatgaatgttgg T/G tcggtctctccttccttttt | 4843 | | |
| ABCG5 | 24 | (intron 11 4791) | ggttagttctaactttctac G/A ttggtaccttcaactttctg | 4844 | | |
| ABCG5 | 25 | (3′untranslated region 2) | tgaggattaaaataaaaaac C/T gtaggaatgggctcaacagt | 4845 | | |
| ABCG5 | 26 | (3′flanking region 1560) | catagcactcagcaagaaac G/C tgtgctaaagactgaggttc | 4846 | | |
| ABCG5 | 27 | (intron 4 1078-1080) | gggcacagctccctgggagc AGG/Δ agaactcccgatagcagagt | 4847 | | |
| ABCG5 | 28 | (intron 10 2321-2327) | agcgggttgggtgagccctt TAACATT/Δ aggtaggtgtggtgttggc | 4848 | | |
| ABCG5 | 29 | (intron 11 422-433) | ggaattaagactagtcagac (A)10-12 gcctgcaggataaaagactg | 4849 | | |
| ABCG5 | 30 | (intron 11 3988-4004) | ctttttttgtagtctggtcc (T)15-17 cttttcctgttcttactctg | 4850 | | |
| ABCG5 | 31 | (3′untranslated region | taccctaaaacttaaagtat (A)11-13 cctaccgaaaaaaaaaaaaa | 4851 | | |
| | | 2719-2731) | | | | |
| ABCG8 | 1 | (5′untranslated region | aagagagctgcagcccaggg G/T cacagacctgtgggccccat | 4852 | | |
| ABCG8 | 2 | (intron 1 898) | cctttgactgaattcgggat A/G tggcaggatttgaagcagga | 4853 | | |
| ABCG8 | 3 | (intron 1 1548) | cctcacaacctgaaaggcca G/T gtgtaaattgagaaattcta | 4854 | | |
| ABCG8 | 4 | (intron 1 1611) | tggtacgggggagccacttc C/T agcccgagccacaacctgtc | 4855 | | |
| ABCG8 | 5 | (intron 1 3245) | tgggacaatgaagcaatgtg T/C acagtgacagcggagagggc | 4856 | | |
| ABCG8 | 6 | (intron 1 3430) | gggttgaggtgggaatggaa A/C tctggagttctactcactgg | 4857 | | |
| ABCG8 | 7 | (intron 1 3509) | tacacaaatcagcttaaaga T/A ctctcatgtacacaccacca | 4858 | | |
| ABCG8 | 8 | (intron 1 3980) | gaaaataaaccctggtcaga C/T gcttgaggtcagcctccctc | 4859 | | |
| ABCG8 | 9 | (intron 1 4123) | aagggtgttctgggctcccc G/A taagtgtttgttgggtgcat | 4860 | | |
| ABCG8 | 10 | (intron 1 5354) | cagcttctaaaggagcccct A/C atctctcctgtct t/c ccacag | 4861 | | |
| ABCG8 | 11 | (intron 1 5368) | gcccct a/c atctctcctgtct T/C ccacagggcctccaggatag | 4862 | | |
| ABCG8 | 12 | (coding region 161 | ggaggtcagagacctcaact G/A ccaggtagaggcacgcctgg | 4863 | | |
| | | (Cys 54 Tyr)) | | | | |
| ABCG8 | 13 | (intron 2 86) | gaaataaaagggtgggccca C/A cttgcaggccctctgccc c/g c | 4864 | | |
| ABCG8 | 14 | (intron 2 105) | a c/a cttgcaggccctctgccc C/G caaggacagagtccagtcca | 4865 | | |
| ABCG8 | 15 | (intron 4 43) | gacccccaggtccaagaagc C/T acagtgtccatgccccgctc | 4866 | | |
| ABCG8 | 16 | (intron 6 1035) | caggaggacaggccgcccct C/T gccctctgtactcacattct | 4867 | | |
| ABCG8 | 17 | (intron 6 1085) | cacagaaaggtcacctccct C/A cctgtgctcaggtggcagcc | 4868 | | |
| ABCG8 | 18 | (intron 6 1184) | gcacctgccgacctggccat C/T ggggaataatttaaagtaac | 4869 | | |
| ABCG8 | 19 | (coding region 1199 | tggggcggtgcagcagttta C/A gacgctgatccggtaattat | 4870 | | |
| | | (Thr 400 Lys)) | | | | |
| ABCG8 | 20 | (intron 8 137) | gaaaaaaacagcatccagca G/A ggcgttggtggcttatgcct | 4871 | | |
| ABCG8 | 21 | (intron 9 412) | ttctcttttcctttccctta T/C tttttaggttactcagagag | 4872 | | |
| ABCG8 | 22 | (intron 10 343) | aggaagcagaggttcagaga G/A gctacgtggctctccaaggc | 4873 | | |
| ABCG8 | 23 | (intron 10 614) | cttttaaacgtttataataa T/C ggcagtgaaggtgctggctt | 4874 | | |
| ABCG8 | 24 | (coding region 1695 | gcctccttcttcagcaatgc C/T ctctacaactccttctacct | 4875 | | |
| | | (Ala 565 Ala)) | | | | |
| ABCG8 | 25 | (intron 11 82) | tgctttcatctggagatgga C/T acttatcacttagatccaac | 4876 | | |
| ABCG8 | 26 | (intron 1 2882-2893) | tctcttagaaatggataaga (T)11-13 gacagagtctcacgctgtgg | 4877 | | |
| ABCG8 | 27 | (intron 1 3654) | tttatctttcccattttttt T/Δ ctgtataattttgggtcttt | 4878 | | |
| ABCG8 | 28 | (intron 1 5045) | tcagagcacagaggtttttt T/Δ atagaactctctccggtcaa | 4879 | | |
| ABCG8 | 29 | (intron 9 292-302) | tggctttactgtgcctattt (A)10-12 tgagagacttgggcaatatg | 4880 | | |
| ABCG8 | 30 | (intron 9 417-418) | tttcctttccctta t/c ttttt (T) aggttactcagagagggcaa | 4881 | | |
| ABCG8 | 30 | (intron 9 417-418) | tttcctttccctta t/c ttttt aggttactcagagagggcaa | 4882 | | |
| ABCG8 | 31 | (intron 10 28-34) | ggcagggttgagagcaagtg (C)7-9 acccaccagggtgggggtaa | 4883 | | |
| ABCG8 | 32 | (3′untranslated region 2) | tcctggggacagtgaggaca A/Δ tgaccctacagatgctcagc | 4884 | | |
| ABCE1 | 1 | (5′flanking region − 158) | aactcagattctcggcacct C/T cagcagctggcttcgccaac | 4885 | | |
| ABCE1 | 2 | (intron 9 237) | ctgaaattatatgcaaattc C/T gtagctttataggaagcaga | 4886 | | |
| ABCE1 | 3 | (intron 9 4203) | ttgtgtaggaagctgataca T/G taatttgacatatgagatgt | 4887 | | |
| ABCE1 | 4 | (intron 10 1811) | ccaagaaacttcagctttct C/T ttcacttaaatataggaaac | 4888 | | |
| ABCE1 | 5 | (intron 17 2301) | atatccagaaacagatggta T/C gtgcagaacaggttgtacag | 4889 | | |
| ABCE1 | 6 | (3′untranslated region 1 | tggatgattagactgactct G/C agaatattgataagccattt | 4890 | | |
| ABCE1 | 7 | (intron 1 5349-5363) | tttgtctgggttggttgggg (T)13-16 gagactgggtctgactctca | 4891 | | |
| ABCE1 | 8 | (intron 1 5845-5854) | tacatttgtcaaaatttata (T)9-10 gcagataatcatttcatctc | 4892 | | |
| ABCE1 | 9 | (intron 5 836-851) | taaattcacatgattctgta (T)14-16 aggatcctcctgactggcag | 4893 | | |
| ABCE1 | 10 | (intron 8 1153-1169) | tctttcaaacttatatttgc (T)13-17 catagtttcatgtttgatga | 4894 | | |
| ABCE1 | 11 | (intron 9 1023-1024) | ttgctctgtttcaaatctct (T) attcatgggccagcagctcg | 4895 | | |
| ABCE1 | 11 | (intron 9 1023-1024) | ttgctctgtttcaaatctct attcatgggccagcagctcg | 4896 | | |
| ABCE1 | 12 | (intron 9 2338-2346) | agtgtagatggacctcgggg (A)8-9 ctagttaaggaaaagtaata | 4897 | | |
| ABCE1 | 13 | (intron 9 3213-3221) | ttccaattttccattgttac (T) cttgccagattactcctgaa | 4898 | | |
| ABCE1 | 14 | (intron 10 284-299) | tcctctgcattttggcttct GCAGTATTACTGTAGT/Δ | 4899 | | |
| | | | atttgtcattttcaaattaa | | | |
| ABCE1 | 15 | (intron 10 840-853) | ttttttggtttctttctttc (T)13-14 aatcttggaggaatcttttt | 4900 | | |
| ABCE1 | 16 | (intron 16 1163-1172) | gattagaaatccaggttaaa (T)9-10 gttttgcacaaaaatattac | 4901 | | |
| ABCE1 | 17 | (intron 16 1372-1382) | taaaatttaatcaaaattga (T)10-11 ctcttagtcctcaaaccctt | 4902 | | |
| ABCF1 | 1 | (5′untranslated region | gccagccccatcggggttcc C/T cgccgccggaagcggaaata | 4903 | | |
| ABCF1 | 2 | (intron 1 101) | gcacgagactgaccgggccc C/G tgcgggagttactgcgcatg | 4904 | | |
| ABCF1 | 3 | (intron 20 69) | tgactttaaccgaccacctc C/T ctctcttctcgggcagaaaa | 4905 | | |
| ABCF1 | 4 | (intron 23 35) | agtgtgccctcatccctgct C/A catggggaccaagctgtagt | 4906 | | |
| ABCF1 | 5 | (intron 7 342-354) | acagagcgagactccgtctc (A)10-14 gaaaaaaaaaaaaaacattt | 4907 | | |
| ABCF1 | 6 | (intron 7 356-369) | cgtctcaaaaaaaaaaaaag (A)13-15 catttcatcagacctgtctt | 4908 | | |
| ABCF1 | 7 | (3′untranslated region 2) | tcagccggccccgagagtga A/Δ gctttccttcccagaagtct | 4909 | | |
| ABCF1 | 8 | (3′flanking region | attaatttgatcaattgtct (T) aatatgtcgtactctagatt | 4910 | | |
| | | 1067-1068) | | | | |
| ABCF1 | 8 | (3′flanking region | attaatttgatcaattgtct aatatgtcgtactctagatt | 4911 | | |
| | | 1067-1068) | | | | |
| GAT1 | 1 | (5′untranslated region − 1 | gcagctcggactcagctccc G/A gagcaacccagctgcggagg | 4912 | | |
| GAT1 | 2 | (5′untranslated region − 2 | gaaggcctcagcccccagcc A/G ctgggctgggcctggcccaa | 4913 | | |
| GAT1 | 3 | (intron 3 150) | caatagaacaaccttttctc G/A ggctcatgccgccctgaccc | 4914 | | |
| GAT1 | 4 | (intron 4 211) | ttctctgggcttccccactc A/C gttctccagcctgcctgctc | 4915 | | |
| GAT1 | 5 | (intron 5 33) | gagacttcccatgataacct C/T ccagggcttcacccccaaac | 4916 | | |
| GAT1 | 6 | (intron 6 168) | gaaccagatgcccccagcct C/T gactcagtcccagtctccac | 4917 | | |
| GAT1 | 7 | (intron 1 58-71) | ggaagatgggggcctttgtt (A)13-15 gtacatggagaaattaactg | 4918 | | |
| GAT1 | 8 | (intron 3 1306-1319) | aataggttgaggaggagcag (A)12-15 tcaagagtgtggagggggca | 4919 | | |
| GAT2 | 1 | (intron 4 842) | ttgacctccaaaagtgtttg G/A attacaggcatgggccattg | 4920 | | |
| GAT2 | 2 | (intron 5 183) | ccacatccatcattcgagac A/C a/c actcgtctcagctgccatg | 4921 | | |
| GAT2 | 3 | (intron 5 184) | cacatccatcattcgagac a/c A/C actcgtctcagctgccatga | 4922 | | |
| GAT2 | 4 | (coding region 1269 | actagactgctagtgtcctc C/T ggtgagcccagtcccatagg | 4923 | | |
| | | (Ser423Ser)) | | | | |
| GAT2 | 5 | (3′unstranslated region 17 | ataaatgtgtacatgagtgt A/G tgaacacaaatacataaggt | 4924 | | |
| GAT2 | 6 | (3′flanking region 1386) | tgtagcagcccacatcgcca G/A tgttcacctgagagagagag | 4925 | | |
| GAT3 | 1 | (5′flanking region − 463) | ttcctgagaggcaaatcccc T/C tcccctactcgggaggtgcc | 4926 | | |
| GAT3 | 2 | (5′untranslated region − 1) | cctgcccacagctctggctc G/A tcttgccccagtgccatgac | 4927 | | |
| GAT3 | 3 | (coding region 153 (Pro51 | cctgtccaccactgtcgccc G/A ccccacaatgcctccacagg | 4928 | | |
| GAT3 | 4 | (intron 2 177) | gcaccaagacccttggcttc T/C tcccactcagagtccaagca | 4929 | | |
| GAT3 | 5 | (intron 2 6201) | gctcatcctctctggtcctt T/G tgccccagcacaggttcctc | 4930 | | |
| GAT3 | 6 | (intron 3 79) | tctgctccacccgtgcaccc G/C caaagaggcaaagagctggg | 4931 | | |
| GAT3 | 7 | (coding region 723 | tggcgttggctgcagttaac T/A gtgtccattcccttcttcgt | 4932 | | |
| | | (Thr241Thr)) | | | | |
| GAT3 | 8 | (intron 5 524) | tcgaagtacaaaggaaagtt T/C aaagagaagcctgagcctgg | 4933 | | |
| GAT3 | 9 | (intron 7 386) | gaccaatgggtttcagactc G/A aagacaaaaattatgtttat | 4934 | | |
| GAT3 | 10 | (intron 9 81) | attgtcctgtcctctaccca G/A gggagccatcctttatgaac | 4935 | | |
| GAT3 | 11 | (5′flanking region | tacatttggtccccaggggg (G) aagcggctgatcaggagaga | 4936 | | |
| | | (−661)-(−660) | | | | |
| GAT3 | 11 | (5′flanking region | tacatttggtccccaggggg aagcggctgatcaggagaga | 4937 | | |
| | | (−661)-(−660) | | | | |
| GAT3 | 12 | (intron 8 211-212) | tctgacttggactgggcaaa AA/Δ gtatggtggtatctggatag | 4938 | | |
| GATP1 | 1 | (5′flanking region − 916) | acagagtagatgttcaataa G/A tatttgttgtatctgtgaga | 4939 | | |
| GATP1 | 2 | (5′flanking region − 843) | tagtgcagcgactatgcctt G/A atgtgtgtgtgtttgggatt | 4940 | | |
| GATP1 | 3 | (5′flanking region − 526) | aaatgtgtgcctgtatgtta T/C acatctgtacatatatttcc | 4941 | | |
| GATP1 | 4 | (5′flanking region − 172) | acaaacacaactcaaagtat G/A tgtgttattaaaagtagcta | 4942 | | |
| GATP1 | 5 | (intron 1 206) | ttgattcaggcaagttagtc C/G taaatggctttgagagactt | 4943 | | |
| GATP1 | 6 | (intron 1 454) | caacataacaataatttcct G/A taagaaaaatggccattttg | 4944 | | |
| GATP1 | 7 | (intron 1 999) | gtttagcaaggttagatatt A/G atgtggatgttaagacaaaa | 4945 | | |
| GATP1 | 8 | (intron 1 1223) | ttgctagaagctagtaggac C/T agctttataaatacagagat | 4946 | | |
| GATP1 | 9 | (intron 1 1326) | aactagttaggcaacccatg T/C gttttaggg g/a aaaagcaatg | 4947 | | |
| GATP1 | 10 | (intron 1 1336) | gcaacccatg t/c gttttaggg G/A aaaagcaatgaggtcatgat | 4948 | | |
| GATP1 | 11 | (intron 1 1498) | atagtttgctcttaagaata C/T actctgagaaggtttatagt | 4949 | | |
| GATP1 | 12 | (intron 1 5041) | ttatgctcccgaggagttag C/T tctctaaatgcataaggaga | 4950 | | |
| GATP1 | 13 | (intron 1 9532) | aaagactgggagcacttccc A/G atgacaaatactagactaga | 4951 | | |
| GATP1 | 14 | (intron 2 961) | aaaaagttatatagaaatat A/G agtgtcactcctttctagtt | 4952 | | |
| GATP1 | 15 | (intron 2 1110) | gtctactagtgttcaactcc T/C ttagatcttagcctgtatca | 4953 | | |
| GATP1 | 16 | (intron 2 1419) | aaagcctaagaaggatgcag T/C gcaatagcctatgtgagaag | 4954 | | |
| GATP1 | 17 | (intron 2 3339) | tatggtttgcaaaaaactta T/C cctctctaggagcaatgctt | 4955 | | |
| GATP1 | 18 | (intron 3 66) | caggaaatgaagttgcactt T/C cctctctaggagcaatgctt | 4956 | | |
| GATP1 | 19 | (intron 3 205) | tcagttttgtcaatttacac A/G atggggatttgggacctttt | 4957 | | |
| GATP1 | 20 | (intron 3 6377) | aatgaatagactttgagtta C/T tggatttttagtggataaat | 4958 | | |
| GATP1 | 21 | (intron 3 7238) | tgaatgtcacattttttaaa G/A tttgtgttccttatctcata | 4959 | | |
| GATP1 | 22 | (intron 4 1016) | ttttattctggattcatgtt T/C gtggaaattgcagtagtcca | 4960 | | |
| GATP1 | 23 | (intron 5 110) | tccacaatgatgagtagagt A/G tcttggcacagttggccttc | 4961 | | |
| GATP1 | 24 | (intron 6 496) | agtgtctgaattataagcca A/G ttttatagttggttgggacc | 4962 | | |
| GATP1 | 25 | (intron 7 1934) | aaagtgaaaggaaattaaaa G/C tgagaacttgagcctgaatg | 4963 | | |
| GATP1 | 26 | (intron 7 2140) | tagaatgtaccaaatgaatc A/G gcatctctgaggatgggacc | 4964 | | |
| GATP1 | 27 | (intron 7 2365) | tgaaatcttctttatcaact C/T gattttcctccagactttac | 4965 | | |
| GATP1 | 28 | (intron 8 88) | gcaaactcctaagttgaagt G/C ttttaggatattttttgact | 4966 | | |
| GATP1 | 29 | (intron 9 534) | tcatattttgtattttaaag G/A ttatctgggttttactgaaa | 4967 | | |
| GATP1 | 30 | (intron 9 1286) | tattcttctgagataaatca T/C tgaaggagtggctatgtggt | 4968 | | |
| GATP1 | 31 | (intron 11 215) | ttcactcctattcctcgcta C/T ttttcttccttatttcttag | 4969 | | |
| GATP1 | 32 | (intron 11 663) | ttcttcttcttttggagctc T/A aaagtagagttcagttaatc | 4970 | | |
| GATP1 | 33 | (intron 11 999) | atcatcactgcatgagagtt A/G gaattatctaactttgtgat | 4971 | | |
| GATP1 | 34 | (intron 11 16727) | tttcttttatttacaaactt A/G tttacttttcaggtgtatga | 4972 | | |
| GATP1 | 35 | (intron 12 48) | ctatcagaacaatattatta T/G tattattttttattacactt | 4973 | | |
| GATP1 | 36 | (intron 12 686) | tatgttttgataaactttgc C/A gtacaaataaagaaaattga | 4974 | | |
| GATP1 | 37 | (intron 12 708) | tacaaataaagaaaattgaa A/G tatttccaaataaatcaagt | 4975 | | |
| GATP1 | 38 | (intron 13 418) | tctctggtctccaaaatcat A/G tattttctccctcttta c/a at | 4976 | | |
| GATP1 | 39 | (intron 13 436) | at a/g tattttctccctcttta C/A attttgctgaaacaatcttc | 4977 | | |
| GATP1 | 40 | (3′untranslated region 2) | gtctttaagaacctaaaaaa C/A ctcttaactcaaaataataa | 4978 | | |
| GATP1 | 41 | (3′flanking region 57) | agtgactaaagtttttctta C/A aaacaagtgtctgaatcaaa | 4979 | | |
| GAPT1 | 42 | (3′flanking region 572) | aatacactatggttatttat G/A tgtactataaatggagtgag | 4980 | | |
| GATP1 | 43 | (3′flanking region 788) | atttcctaaatgatcagatg C/T atcatatgaaaaaagaaagc | 4981 | | |
| GATP1 | 44 | (3′flanking region 1356) | aggtgactgacataaatggg G/A gcagaggacataatgaggtt | 4982 | | |
| GATP1 | 45 | (5′untransalted region | attttctaatctgtattaaa (A) gcgttccaggtatttttgta | 4983 | | |
| | | (−189)-(−188) | | | | |
| GATP1 | 45 | (5′untranslated region | attttctaatctgtattaaa gcgttccaggtatttttgta | 4984 | | |
| | | (−189)-(−188) | | | | |
| GATP1 | 46 | (intron 4 725-726) | tgatctttaatagcggggaa AA/Δ caggcaagtacgctatagtt | 4985 | | |
| GATP1 | 47 | (intron 4 1082-1083) | attgagtcaggaaaccaaaa CA/Δ gtttcaaaaatttgaaaaat | 4986 | | |
| GATP1 | 48 | (intron 4 2301) | aatgtcatgtcttttttttt T/Δ aatgcagagtgtacaaagga | 4987 | | |
| GATP1 | 49 | (intron 9 241-46) | attgtatgtgcatgtgggtg TGTGTG/Δ catgattgtctttgtgatat | 4988 | | |
| GATP2 | 1 | (5′flanking region − 2574) | ggataaggcaacccctatgt A/G tcactgctgcaggagaggga | 4989 | | |
| GATP2 | 2 | (5′flanking region − 1723) | tctttcagacttcaaaggcc A/G tgatatttcatcagagctgt | 4990 | | |
| GATP2 | 3 | (5′flanking region − 1180) | tgcttatttaacaggcataa T/G ctttggtctcctgagccaga | 4991 | | |
| GATP2 | 4 | (5′flanking region − 811) | tatgtgcatatgtgtataca G/A gtaaaagtgtgtatatatgt | 4992 | | |
| GATP2 | 5 | (intron 1 7188) | aatcatttgaaatttaagaa A/G aaaatatgttcagagaaaaa | 4993 | | |
| GATP2 | 6 | (intron 1 7331) | gtgaaatgaggaacaaagtg T/C ccacctttttttcctgaata | 4994 | | |
| GATP2 | 7 | (intron 1 7391) | agagagatgtgaaatagtat T/G tttctggggaagtaggggaa | 4995 | | |
| GATP2 | 8 | (intron 1 7886) | ttgttagtagaaagaaaatc G/A aagcctaaaactaaaggaag | 4996 | | |
| GATP2 | 9 | (intron 1 7958) | ttgctattatataatttttt T/A a/t aaaaaagatttcctaatat | 4997 | | |
| GATP2 | 10 | (intron 1 7959) | tgctattatataattttttt t/a A/T aaaaaagatttcctaatat | 4998 | | |
| GATP2 | 11 | (intron 1 8036) | ggaaaaaatggggtgaaatt A/T atcaaagggcagcttattac | 4999 | | |
| GATP2 | 12 | (intron 1 9164) | acattatattctatataaaa G/T agtcagttgaagtaaaaagt | 5000 | | |
| GATP2 | 13 | (intron 2 193) | tgattaagtatttctttggc G/A aaatttttgatgcttaatag | 5001 | | |
| GATP2 | 14 | (intron 2 1020) | ttgagtaacatttaggccaa G/A tggcagtcataaggaaaaag | 5002 | | |
| GATP2 | 15 | (intron 2 14865) | agaggaattaatcataagag G/T tttatttggctaaagtgaca | 5003 | | |
| GATP2 | 16 | (intron 2 14931) | gttagttaataacagaaaaa A/T tatcagaaattttaaaaaaa | 5004 | | |
| GATP2 | 17 | (intron 2 15417) | ttctaaaataagtaagctaa A/T tattctatattatactacta | 5005 | | |
| GATP2 | 18 | (intron 2 20823) | ttgtataagagatacaaaac A/C aattcctactaggggaaata | 5006 | | |
| GATP2 | 19 | (intron 2 20852) | ctaggggaaataaagcttca G/C taaggaggtggcattaagct | 5007 | | |
| GATP2 | 20 | (intron 2 21360) | ttcaaaagctgtatttctca T/C tagtgctttttgtgaataaa | 5008 | | |
| GATP2 | 21 | (intron 2 21467) | tatatacacaatacctgtcc A/G gaagatgtggtataagccaa | 5009 | | |
| GATP2 | 22 | (intron 2 21621) | tatcaatacttatgaagaga A/G ctaactattctaactaggga | 5010 | | |
| GATP2 | 23 | (intron 2 22760) | ttccccacctcctgttggtt C/G tcctcttaaacttctccttg | 5011 | | |
| GATP2 | 24 | (intron 2 23199) | cctatctgcacataacatta C/T aaacttatggcaattata a/g a | 5012 | | |
| GATP2 | 25 | (intron 2 23218) | a c/t aaacttatggcaattata A/G aactcaatacatattatact | 5013 | | |
| GATP2 | 26 | (intron 2 23330) | gcccttgttcctgttcctct G/A tacctgcctcaactacatag | 5014 | | |
| GATP2 | 27 | (intron 2 23673) | ctggagacggtagctcaaac T/C gaggatgaaaatagacattt | 5015 | | |
| GATP2 | 28 | (intron 3 89) | ggttatcaactggggtaaat T/G tatctctcacaggcaatttg | 5016 | | |
| GATP2 | 29 | (intron 3 224) | tgctaaatattctataatgc A/G caaagaatgatgtaactgaa | 5017 | | |
| GATP2 | 30 | (intron 4 97) | ccctttaaataggcagttac C/A ttttgagaagatacccacta | 5018 | | |
| GATP2 | 31 | (intron 4 568) | ttcatgatccaaattgtggc A/G acgtatttccaggcaacaag | 5019 | | |
| GATP2 | 32 | (intron 4 599) | aggcaacaagatagaagaag A/G aaagaataagaagcaacaaa | 5020 | | |
| GATP2 | 33 | (intron 4 753) | aaaatagacattattccaag T/A taccaagttcccggttaaaa | 5021 | | |
| GATP2 | 34 | (intron 4 781) | ttcccggttaaaaatcccaa G/C tataattactgtggaaggaa | 5022 | | |
| GATP2 | 35 | (intron 4 1196) | aaggaccacaatctagatca G/T cattgctctaaatatgccat | 5023 | | |
| GATP2 | 36 | (intron 4 1229) | tatgccataatatgtgacac T/C tttgcacctggtatttctac | 5024 | | |
| GATP2 | 37 | (intron 4 1623) | catctagttgaaatggatta G/C atttttattttactacattt | 5025 | | |
| GATP2 | 38 | (coding region 388 | attctaaagaaactaatatc A/G attcatcagaaaattcaaca | 5026 | | |
| | | (Asn130Asp)) | | | | |
| GATP2 | 39 | (coding region 452 | taatcaaattttatcactca A/G tagagcatcacctgagatag | 5027 | | |
| | | (Asn151Ser)) | | | | |
| GATP2 | 40 | (intron 5 165) | ttaatatacacagttcgccc A/T ttaacaacacaggtttaaac | 5028 | | |
| GATP2 | 41 | (intron 5 189) | acaacacaggtttaaactac G/A c g/a ttttcacttctatgcaaa | 5029 | | |
| GATP2 | 42 | (intron 5 191) | aacacaggtttaaactac g/a G/A ttttcacttctatgcaaatt | 5030 | | |
| GATP2 | 43 | (intron 5 507) | atataactttgctttcattg C/T aaaaggcaaact a/g ttatatc | 5031 | | |
| GATP2 | 44 | (intron 5 520) | ttcattg c/t aaaaggcaaact A/G ttatatcatttaaagacttt | 5032 | | |
| GATP2 | 45 | (intron 5 856) | agtcatgataaacctaatag A/G ataaaacaacaaaaaagaaa | 5033 | | |
| GATP2 | 46 | (intron 5 1157) | acagataatttttacttgtt T/C gtgcttttctgtatgatatg | 5034 | | |
| GATP2 | 47 | (intron 5 1226) | ccttgattgtaataatctcc A/C c a/c tgccaagagtggggccag | 5035 | | |
| GATP2 | 48 | (intron 5 1228) | ttgattgtaataatctcc c/a c A/C tgccaagagtggggccaggt | 5036 | | |
| GATP2 | 49 | (intron 5 1384) | actgttctcgtggtaatgaa G/T aagtctcacaagatctgatg | 5037 | | |
| GATP2 | 50 | (intron 5 1348) | ttataaatgagagttcccct G/A caaaagctctcttgcctgcc | 5038 | | |
| GATP2 | 51 | (intron 5 1407) | ttgctcttccttcatcttcc G/A ccatgattgtgaggcccccc | 5039 | | |
| GATP2 | 52 | (coding region 521 | gtcatacatgtggatatatg T/C gttcatgggtaatatgcttc | 5040 | | |
| | | (Val174Ala)) | | | | |
| GATP2 | 53 | (coding region 571 | gggagactcccatagtacca T/C tggggctttcttacattgat | 5041 | | |
| | | (Leu191Leu)) | | | | |
| GATP2 | 54 | (coding region 597 | ctttcttacattgatgattt C/T gctaaagaaggacattcttc | 5042 | | |
| | | (Phe199Phe)) | | | | |
| GATP2 | 55 | (intron 7 33) | agaacaaggtaccatgataa C/T gtctttctaagcacacatgc | 5043 | | |
| GATP2 | 56 | (intron 7 267) | caaaataaccaaatgtaaaa T/A gtctccctcccaaactgact | 5044 | | |
| GATP2 | 57 | (intron 7 1260) | gtaatctcacatttctctgc A/G tttacacttggtaaaacttt | 5045 | | |
| GATP2 | 58 | (intron 7 2273) | ttctcacgtcctatctagcg C/T gattatgacccttagttact | 5046 | | |
| GATP2 | 59 | (intron 8 207) | gtggaagagaattaggtttg T/C actttttagcagggagaaac | 5047 | | |
| GATP2 | 60 | (intron 8 546) | tcgggagaagtttctcccta T/C gtaattagagtaatattt a/t t | 5048 | | |
| GATP2 | 61 | (intron 8 565) | a t/c gtaattagagtaatattt A/C ttttggtaattatctatcta | 5049 | | |
| GATP2 | 62 | (intron 8 668) | taagtaatgtaaattaggat G/T catcagcatttgacagtgcc | 5050 | | |
| GATP2 | 63 | (intron 8 739) | tggagaaccattgagagtca A/G taaacaaagagaatgacttg | 5051 | | |
| GATP2 | 64 | (intron 9 112) | atttttagtaatacaggataa G/C tataattttcttgtatctt | 5052 | | |
| GATP2 | 65 | (intron 9 266) | ttagaggtagtatctgtata A/G ttggatcttataatttagtg | 5053 | | |
| GATP2 | 66 | (intron 9 305) | tgctaagatctgagacaaac C/G cttttgtaattataatcatt | 5054 | | |
| GATP2 | 67 | (intron 11 10224) | tacacttgttccataaaaaa T/C tcctctatattattcctagt | 5055 | | |
| GATP2 | 68 | (intron 11 10359) | attaatagattcaacgtgag G/C ttcccttaaactttagccta | 5056 | | |
| GATP2 | 69 | (intron 11 10916) | cttatatagaaagaaatcca C/G aaaactattttaccttttat | 5057 | | |
| GATP2 | 70 | (intron 11 10997) | aatatattagtttgaacaag T/C gagacttcactaaatataat | 5058 | | |
| GATP2 | 71 | (intron 11 11018) | gagacttcactaaatataat G/A caatgtatttgcagcactgt | 5059 | | |
| GATP2 | 72 | (intron 12 442) | aacattccaaaacttttaat C/T ga c/t t c/a acagcatgacttt | 5060 | | |
| GATP2 | 73 | (intron 12 445) | attccaaaacttttaat c/t ga C/T t c/a acagcatgacttttat | 5061 | | |
| GATP2 | 74 | (intron 12 447) | tccaaaacttttaat c/t ga c/t t C/A acagcatgacttttataa | 5062 | | |
| GATP2 | 75 | (intron 12 907) | aatgaaaagaagctggcaga T/C tgaaacatactgaatgagag | 5063 | | |
| GATP2 | 76 | (intron 113 65) | tatatatatatatatatata C/T acacacacatacatatatta | 5064 | | |
| GATP2 | 77 | (intron 13 870) | aattctgagtatcctatttc G/A atgtatccaatctgtggcac | 5065 | | |
| GATP2 | 78 | (intron 13 1935) | taaaaaaaaaaaaagtctgc T/C tttacagcaattgagccaag | 5066 | | |
| GATP2 | 79 | (intron 13 2261) | aacgaatcctccaaattttt G/C aacttttatttaatcaaaat | 5067 | | |
| GATP2 | 80 | (intron 14 248) | tcaaggataataaccaactt G/A tcaaaaatcagagataatag | 5068 | | |
| GATP2 | 81 | (intron 14 2463) | atttgtttactaatatggaa C/G cttcttcaagacatattttt | 5069 | | |
| GATP2 | 82 | (intron 14 2857) | tcatcatgtatttccaggac A/T cctggcaagatgctcctcag | 5070 | | |
| GATP2 | 83 | (intron 14 11458) | atctccagaggtcctgctgt C/T tccccaaagtccactgaccc | 5071 | | |
| GATP2 | 84 | (3′untranslated region 22) | ataataaaacaaactgtagg T/C agaaaaaatgagagtactca | 5072 | | |
| GATP2 | 85 | (3′untranslated region 24) | tcttaataaaacaaatgagt A/G tcatacaggtagaggttaaa | 5073 | | |
| GATP2 | 86 | (3′untranslated region 25) | cagagtttgaactataatac T/G aaggcctgaagtctagcttg | 5074 | | |
| GATP2 | 87 | (3′untranslated region 25) | gcctgaagtctagcttggat A/G tatgctacaataatatctgt | 5075 | | |
| GATP2 | 88 | (intron 1 457-458) | taattggcaaacataaaaaa (A) caggtgtctcaaagtcacat | 5076 | | |
| GATP2 | 88 | (intron 1 457-458) | taattggcaaacataaaaaa caggtgtctcaaagtcacat | 5077 | | |
| GATP2 | 89 | (intron 1 753-7538) | gatcagcattacaaccaaga (G) atggagaatgacattcagga | 5078 | | |
| GATP2 | 89 | (intron 1 753-7538) | gatcagcattacaaccaaga atggagaatgacattcagga | 5079 | | |
| GATP2 | 90 | (intron 1 10032-10035) | tgtgtgattctatattactt ACTT/Δ gtttcaaatttctctccaca | 5080 | | |
| GATP2 | 91 | (intron 1 10058-10061) | ttcaaatttctctccacaaa TTTA/Δ tttttctattaaattgtaat | 5081 | | |
| GATP2 | 92 | (intron 2 413-423) | acttatttaaaaattctttt (A)11-13 caaaaacaggattttaaaaa | 5082 | | |
| GATP2 | 93 | (intron 3 1595-1603) | ttgccaagtaattcaagtgc (T)8-10 gtatttaaaacaacttttca | 5083 | | |
| GATP2 | 94 | (intron 4 10-23) | ttcatgggatagtaagtgtt (A)12-14 cctctgtgccactatcagta | 5084 | | |
| GATP2 | 95 | (intron 5 1567-1572) | gtgaatataaattacttgta CTTGTA/Δ atttcaagcagatgcaactg | 5085 | | |
| GATP2 | 96 | (intron 5 1577-1585) | attacttgtacttgtaaatt (A)9-10 taagtagaataattaagagt | 5086 | | |
| GATP2 | 97 | (intron 8 1939-1941) | ttctctaactccttctactc CTT/Δ atttcaagcagatgcaactg | 5087 | | |
| GATP2 | 98 | (intron 10 3077-3078) | aaattctttatctacttttt (CTT) ttccctctttctctgctttc | 5088 | | |
| GATP2 | 98 | (intron 10 3077-3078) | aaattctttatctacttttt ttccctctttctctgctttc | 5089 | | |
| GATP2 | 99 | (intron 11 11011) | aacaag t/c gagacttcactaa A/Δ tataat g/a caatgtattt | 5090 | | |
| GATP2 | 100 | (intron 12 1160-1169) | agcatgacatggtagagatg (A)9-11 gcatttttaacatttgttaa | 5091 | | |
| GATP2 | 101 | (intron 12 1310-1312) | tccatcttaatataaaatgt TGT/Δ ctactcaaaaggagaagtct | 5092 | | |
| GATP2 | 102 | (intron 13 9-34) | tacgagcactaggtatgatg (A)24-27 tatatatatatatatatata | 5093 | | |
| GATP2 | 103 | (intron 13 35-64) | aaaaaaaaaaaaaaaaaaaa (TA)10-21 c/t acacacacatacatat | 5094 | | |
| GATP2 | 104 | (intron 13 1379-1387) | aaaattattcaccacaatac (A)8-10 caaagtaaagttatgaacac | 5095 | | |
| GATP2 | 105 | (intron 13 1916-1928) | aattctcttaaaataatgtt (A)11-13 gtctgc t/c tttacagcaa | 5096 | | |
| GATP2 | 106 | (intron 14 588-596) | caattatactttacctcttt (A)8-10 ctaatttcaaattcatatat | 5097 | | |
| GATP8 | 1 | (5′flanking region − 1413) | aataggggcttaataactct G/C aaacttatgatttctcatat | 5098 | | |
| GATP8 | 2 | (intron 1 38962) | atgaaattagtttaaaaata G/A caaccttaactatactcctc | 5099 | | |
| GATP8 | 3 | (intron 2 253) | acagacttaccaacaaagaa T/G tatccttcccaaaatgtcta | 5100 | | |
| GATP8 | 4 | (intron 2 329) | actcatggtttgcaaattaa C/G tttttaggaaactttatctc | 5101 | | |
| GATP8 | 5 | (intron 2 2568) | ccattctggtgctttctttc G/A tgaaactattttccatcagt | 5102 | | |
| GATP8 | 6 | (intron 2 2679) | ctcttattgctcttcttcca T/C gttttaatctaaataattta | 5103 | | |
| GATP8 | 7 | (intron 2 2753) | caggaaactttcacaaagcc C/A ctaattaatttaagctccct | 5104 | | |
| GATP8 | 8 | (intron 2 3132) | tggtttaatgtaggagagtt T/C accttcacagttaaattaca | 5105 | | |
| GATP8 | 9 | (intron 2 3193) | aatgtcttgggcatatttgc A/G ttcatttggggca t/c tcagtt | 5106 | | |
| GATP8 | 10 | (intron 2 3207) | atttgc a/g ttcatttggggca T/C tcagttctactagatacaaa | 5107 | | |
| GATP8 | 11 | (coding region 334 | gaactggaagtattttgaca T/G ctttaccacatttcttcatg | 5108 | | |
| | | (Ser112Ala)) | | | | |
| GATP8 | 12 | (intron 3 76) | agaattttatttttatactt G/A taagtgggcagttacctttt | 5109 | | |
| GATP8 | 13 | (intron 3 2443) | tcaatttcatgttgctctta C/T agttataggtattctaaaga | 5110 | | |
| GATP8 | 14 | (intron 4 67) | taatcacgtctataaagttt C/G tgatattctttaacaaaatt | 5111 | | |
| GATP8 | 15 | (intron 4 91) | tattctttaacaaaattgat T/A taagaacaaataggaagaac | 5112 | | |
| GATP8 | 16 | (intron 4 197) | ggtttgaactgcacctgttc G/A cttatatgcagcttttgtcc | 5113 | | |
| GATP8 | 17 | (intron 4 813) | tttaacagaataaaaaaaaa T/A attttgtaacgacaaaagaa | 5114 | | |
| GATP8 | 18 | (intron 4 974) | atatgcaccttaaaaataac C/G tggatttttaaatatgtaat | 5115 | | |
| GATP8 | 19 | (intron 4 1003) | taaatatgtaatgtacataa G/T gaatattatgcatattttgt | 5116 | | |
| GATP8 | 20 | (intron 6 155) | cattaataatcagaataaaa A/G agaaatttagctcctattta | 5117 | | |
| GATP8 | 21 | (intron 6 750) | atccaactggggtttagatt T/G cctctttctgcctctcctcc | 5118 | | |
| GATP8 | 22 | (intron 6 780) | gcctctcctccatctgcacc C/T tctcttttcctcagcaaaca | 5119 | | |
| GATP8 | 23 | (intron 6 1248) | ctatgccctgtaatctcaca C/T ttccctttatttaaaattgg | 5120 | | |
| GATP8 | 24 | (intron 6 1500) | tcgtgtctgtgttagcatat A/G ataactcatcagggtttgtg | 5121 | | |
| GATP8 | 25 | (intron 6 2008) | ataacataaatgagtaaaga A/G tatcaagggcaggaaattag | 5122 | | |
| GATP8 | 26 | (intron 6 2087) | actactctccccatacacac T/C aaaactcatgtgctccccag | 5123 | | |
| GATP8 | 27 | (intron 6 12305) | tcatctatggaggactgcaa T/C cattatcattatttcccaga | 5124 | | |
| GATP8 | 28 | (intron 7 363) | taacaaatgataccagccat C/G atactattctctggtaatag | 5125 | | |
| GATP8 | 29 | (intron 7 411) | cctttattttttgagaacct G/A gtggatgatattaaga c/a gta | 5126 | | |
| GATP8 | 30 | (intron 7 428) | cct g/a gtggatgatattaaga C/A gtatatagatcactgtaata | 5127 | | |
| GATP8 | 31 | (intron 7 634) | aaaattatatatatacatat A/G taatcttacctaagtattca | 5128 | | |
| GATP8 | 32 | (intron 7 1791) | tgtttttttaagggtagtga T/C gtgaatagtaaagcgaattt | 5129 | | |
| GATP8 | 33 | (intron 7 2000) | agttgagcaaattgctctca G/A gtagcataatgtcacttgaa | 5130 | | |
| GATP8 | 34 | (intron 7 2043) | gtttattgatccatttttta A/G tggatcaacattgtagtgag | 5131 | | |
| GATP8 | 35 | (intron 7 2171) | atttattttgagcaaaggtc G/A c g/a actct c/t cttagaaagc | 5132 | | |
| GATP8 | 36 | (intron 7 2173) | ttattttgagcaaaaggtc g/a c G/A actct c/t ttagaaagcct | 5133 | | |
| GATP8 | 37 | (intron 7 2179) | tgagcaaaggtc g/a c g/a actct C/T ttagaaagcctcacaaat | 5134 | | |
| GATP8 | 38 | (intron 7 2219) | atttctccatcttgt a/g ata T/A catcgttgttctgcatttga | 5135 | | |
| GATP8 | 39 | (intron 7 2261) | cagatattaatatatatttt A/T ttattgaaatatgttatttt | 5136 | | |
| GATP8 | 40 | (intron 8 150) | acaaaatttctccatcttgt A/G ata t/a catcgttgttctgcat | 5137 | | |
| GATP8 | 41 | (intron 8 154) | aatttctccatcttgt a/g ata T/A catcgttgttctgcatttga | 5138 | | |
| GATP8 | 42 | (intron 8 1303) | ttttttttgagatggagtct C/T gctctgttgcccaggctggg | 5139 | | |
| GATP8 | 43 | (intron 8 1372) | aagctccgcctcccaggttc T/G ccacccttctcttaaagaaa | 5140 | | |
| GATP8 | 44 | (coding region 1272) | tccttcttgtttcaacttct A/G tatttccctctaatctgcga | 5141 | | |
| | | (Leu24Leu)) | | | | |
| GATP8 | 45 | (intron 10 63) | tcacagatttgatttaataa A/T tacttatcaaatcttcctat | 5142 | | |
| GATP8 | 46 | (intron 10 911) | cttgcccaatatcctaccaa C/T gtattattaaacggcatgga | 5143 | | |
| GATP8 | 47 | (intron 10 972) | tcctagtttccttgaagata G/A gctacaactttagtaaactt | 5144 | | |
| GATP8 | 48 | (intron 10 1101) | tccctggtcctgtgttgtcc A/T g t/c agtgaagacctgaaagag | 5145 | | |
| GATP8 | 49 | (intron 10 1103) | cctggtcctgtgttgtcc a/t g T/C agtgaagacctgaaagagag | 5146 | | |
| GATP8 | 50 | (intron 10 2027) | cccattttcatgagtggcta A/G g/a ttttgtcccgtttcaaaact | 5147 | | |
| GATP8 | 51 | (intron 10 2028) | ccattttcatgagtggctaa/g G/A ttttgtcccgtttcaaacta | 5148 | | |
| GATP8 | 52 | (intron 10 2372) | tgtatttggtaaatgtattt G/T ttaatatttcaaaaactatt | 5149 | | |
| GATP8 | 53 | (intron 11 10538) | caacagaggatcaatgtaaa T/G gaaatctcttaaattaaaca | 5150 | | |
| GATP8 | 54 | (intron 12 55) | ataaatattaatgttaaata C/T taaagactgaatgcaattaa | 5151 | | |
| GATP8 | 55 | (intron 12 1802) | taaaatgaatcggtaaaaca T/G tcatgtataaatcactgtca | 5152 | | |
| GATP8 | 56 | (intron 12 2612) | ataggcatataatactcttt C/A ttccctctgtatatagggag | 5153 | | |
| GATP8 | 57 | (coding region 1833 | aacagctgtggagcacaagg G/A gcttgtaggatatataattc | 5154 | | |
| | | (Gly611Gly)) | | | | |
| GATP8 | 58 | (5′flanking region | tacataacatatacctatat CTAT/Δ gttatgtgtctgcttatata | 5155 | | |
| | | (−1590)-(−1587) | | | | |
| GATP8 | 59 | (5′untranslated region | agcatcagcaacaattaaaa ATATTCACTTGGTATCTG/Δ | 5156 | | |
| | | (−28)-(−11) | tagtttaataatggaccaac | | | |
| GATP8 | 60 | (5′untranslated region | tattcacttggtatctgtag TTTA/Δ ataatggaccaacatcaaca | 5157 | | |
| | | (−7)-(−4) | | | | |
| GATP8 | 61 | (intron 4 213-214) | ttc g/a cttatatgcagctttt (T) gtccaaccaaacagaaggag | 5158 | | |
| GATP8 | 61 | (intron 4 213-214) | ttc g/a cttatatgcagctttt gtccaaccaaacagaaggag | 5159 | | |
| GATP8 | 62 | (intron 4 505) | tataactttctctttataaa G/Δ atgcaaaatgttatagcatt | 5160 | | |
| GATP8 | 63 | (intron 4 616) | aatgaagtggaggaaaaaaa A/Δ tgatttcaagttttctgtct | 5161 | | |
| GATP8 | 64 | (intron 4 804-812) | acatccatgtttaacagaat (A)9-11 t/a attttgtaacgacaaaag | 5162 | | |
| GATP8 | 65 | (intron 4 855) | agattgtttaaccaaattag G/Δ aaactattattcaacacact | 5163 | | |
| GATP8 | 66 | (intron 7 619-628) | ttttatatatgaattaaaat (AT)4-5 catat a/g taatcttaccta | 5164 | | |
| GATP8 | 67 | (intron 7 1773-1779) | attttctatattatgaactg (T)7-8 aagggtagtga t/c gtgaata | 5165 | | |
| GATP8 | 68 | (intron 8 1270-1290) | tagtgtgccacccttctctc (T)19-23 gagatggagtct c/t gctc | 5166 | | |
| GATP8 | 69 | (intron 10 665) | aactcaaaggcttttttttt T/Δ ccatgtgacacatatcctgt | 5167 | | |
| GATP8 | 70 | (intron 11 247-250) | aaaaatcttaaggcacacac TGAT/Δ tgacagttgccttgattgta | 5168 | | |
| GATP8 | 71 | (intron 12 1622-1630) | aaataaattgttggcatcta (T)8-10 atttttctaagggtcgctgt | 5169 | | |
| GATP8 | 72 | (3′untranslated region | cctgatgcctttaaaaaaaa A/Δ tgaaacactttggatgtatt | 5170 | | |
| | | 2464-2465) | | | | |
| TAP1 | 1 | 5′flanking − 673 | agctaagagtcaaagcaccc G/C ctttttccaccagcctcgcg | 5171 | | |
| TAP1 | 2 | 5′flanking − 646 | ccaccagcctcgcgtgcctg T/G tcccttcacggacactctag | 5172 | | |
| TAP1 | 3 | 5′flanking − 563 | ttgcaagcgctggctgctac A/C ggcgacctccctgcgctccc | 5173 | | |
| TAP1 | 4 | 5′flanking − 236 | gctttgcgcgcggcgctaac G/T tgtgtagggcagatctgccc | 5174 | | |
| TAP1 | 5 | intron 3 + 408 | aaggaaactgaggccaagac C/T ctaaatgctgaaactgcaca | 5175 | | |
| TAP1 | 6 | exon 4 + 153 | ccctcaccatggtcaccctg A/G tcaccctgcctctgcttttc | 5176 | | |
| TAP1 | 7 | intron 4 + 289 | gtatttctttagcatccaag G/T ggcatagctgtgtctctttc | 5177 | | |
| TAP1 | 8 | intron 4 + 291 | atttctttagcatccaaggg C/G catagctgtgtctctttctc | 5178 | | |
| TAP1 | 9 | intron 5 + 1139 | ttccttcaggttaatgactg C/T ggttctttgtgtcccctcca | 5179 | | |
| TAP1 | 10 | intron 7 + 375 | gtctctgcccttgtctttgc C/T gcttcttctatctctactcc | 5180 | | |
| TAP1 | 11 | 3′flanking + 71 | agcgcacttttcagctgcgg G/A tgtctcctcttttatcatcc | 5181 | | |
| TAP1 | 12 | 3′flanking + 129 | aactgcatcaccttttccct T/C aagctttttaattcctatga | 5182 | | |
| TAP1 | 13 | 3′flanking + 459 | cattcagggaggcccaggtc G/A tgtgacgtcgacagttgctg | 5183 | | |
| TAP2 | 1 | intron 3 + 8 | tctcctttggcaggtaggtg G/A tgggcagctgggtccatttg | 5184 | | |
| TAP2 | 2 | intron 4 + 104 | cttcacccgtatgccaggac C/T tggggatgcttttctcttgt | 5185 | | |
| TAP2 | 3 | intron 10 + 219 | gcagcagtggtgctccctcc A/G tgggcagccccgtcaggtcc | 5186 | | |
| TAP2 | 4 | intron 11 + (317-319) | atggtgcccaggtggatgtg GTG/Δ tccatctcattcctgtcttt | 5187 | | |
| TAP2 | 5 | exon 12 + 19 | agctgcaggactggaattcc T/C gtggggatcgcacagtgctg | 5188 | | |
| TAP2 | 6 | exon 12 + (356-357) | aggtggggtggggtggggtg GG/TGGTGGGGTGGA ggctgtctgtgtcc | 5189 | | |
| OCTN1 | 1 | intron1+ 6602 | aggcgagccaggttatgtgg C/T gaaggataaggcctcttccc | 5190 | | |
| OCTN1 | 2 | intron1+ 6790 | gacaaaaggggaaaaccttc C/T gtgataggcaggtttgtgga | 5191 | | |
| OCTN1 | 3 | intron1+ 14019 | cactgtctcccactgggccc G/A ccatgtcactgttaaccaca | 5192 | | |
| OCTN1 | 4 | intron1+ 14136 | ccggtttcctaagaaaagcc T/C tttctaaaggacccctctta | 5193 | | |
| OCTN1 | 5 | intron1+ 14266 | agctttccaaaaagacactt G/T cggcaccataactccccaaa | 5194 | | |
| OCTN1 | 6 | intron1+ 14412 | cttggggcaaacggccactg C/T gtgtgcatggctcttcctgt | 5195 | | |
| OCTN1 | 7 | intron1+ 15776 | acataggagacacttctttc G/A gatctcagtattcagaacaa | 5196 | | |
| OCTN1 | 8 | intron1+ 15817 | ctgtgcttctgcgaataagc A/G gactacttcggatactgtaa | 5197 | | |
| OCTN1 | 9 | intron1+ 15889 | agagccagttttggagcccc G/A tctggcaagcaggcaggccc | 5198 | | |
| OCTN1 | 10 | intron1+ 16063 | acctctgtctgctgcagaat A/G aggtgtgatataaatatgtg | 5199 | | |
| OCTN1 | 11 | intron2+ 1105 | atatttccacaaggtccttg C/A gtacactgctccatgctttt | 5200 | | |
| OCTN1 | 12 | intron3+ 1022 | cttctgtcaagttgccagga T/C ggaaatattccaactctact | 5201 | | |
| OCTN1 | 13 | intron3+ 1217 | tccccttcctgcagggggaa G/A gagcggggcaagattttctt | 5202 | | |
| OCTN1 | 14 | intron3+ 1596 | aagccagagaagctctctcc G/A tgggaatgggaacaaggtgg | 5203 | | |
| OCTN1 | 15 | intron3+ 1720 | ggagcctccaagcctcccct G/A tgtgagcgggtgaggcaggg | 5204 | | |
| OCTN1 | 16 | intron3+ 2104 | tatgagactcgttgtgttgg G/A ttctcaggtctgaaagttta | 5205 | | |
| OCTN1 | 17 | intron3+ 8323 | cctttccccttttctaagtg G/C tgatagtttgaactctaact | 5206 | | |
| OCTN1 | 18 | intron4+ 926 | tttttggaactcacaattta G/T actagacctcatggttgccc | 5207 | | |
| OCTN1 | 19 | intron4+ 1055 | cacctgtctgacgagatagc G/A caggtcaggtgggctcactc | 5208 | | |
| OCTN1 | 20 | intron5+ (1197-1202) | caacaacaacaacaacaaca ACAACA/Δ ttgggagtgtctaacacttc | 5209 | | |
| OCTN1 | 21 | intron5+ (2071-2083) | gttctgctcattgctcatgc (T)11-13 caaaaaaagaaactaaggca | 5210 | | |
| OCTN1 | 22 | intron5+ 2781 | tgatcattcctagaaaaaag G/A acactcacatttggagagga | 5211 | | |
| OCTN1 | 23 | intron6+ (882-917) | tcctactctatgatggcagc (AC)15-18 gatgatcgtcagaactggta | 5212 | | |
| OCTN1 | 24 | intron6+ 924 | acacacacacacacgatgat A/C gtcagaactggtagatttag | 5213 | | |
| OCTN1 | 25 | intron7+ 511 | attattgatagtaatagaaa T/C acatatttcttaataataag | 5214 | | |
| OCTN1 | 26 | exon8+ 124 | ggtcaggaacatggcggtgg G/A ggtcacatccacggcctcca | 5215 | | |
| OCTN1 | 27 | intron8+ 3514 | acacacacacctgaaaacat G/A tatgaattctcaggaaaggt | 5216 | | |
| OCTN1 | 28 | intron8+ 3902 | aagcaagatgaggatctgtt T/C ttctcctgtgtgagtaaagc | 5217 | | |
| OCTN1 | 29 | intron8+ (4064-4089) | gtgaacataatacttagttg (T)18-26 gagtctcatagccctgtgga | 5218 | | |
| OCTN1 | 30 | 3′flanking + 115 | aaccaaatgattatatgcag T/A attcctatccagaaaacctt | 5219 | | |
| OCTN2 | 1 | 5′flanking − 225 | cggcgctagaggagcgagtt C/T ggactcggaccccaaggcct | 5220 | | |
| OCTN2 | 2 | 5′flanking − 124 | gctggcagaggccgggcctc G/T ccaggtccccaggacaggcc | 5221 | | |
| OCTN2 | 3 | 5′flanking − 13 | ggcgccgctctgcctgccag C/G ggggcgcgccttgcggccca | 5222 | | |
| OCTN2 | 4 | intron 1 + 232 | ggtggtcagtctggcctccc G/A tcctgatggccactttgaag | 5223 | | |
| OCTN2 | 5 | intron 1 + 314 | atggccctgtgtgtccagga C/T ttactctagttggggttggg | 5224 | | |
| OCTN2 | 6 | intron 1 + 5055 | catgtggtacctagcagcat G/A tctgactgttgatacggtca | 5225 | | |
| OCTN2 | 7 | intron 1 + 6437 | gaagcttggcctcacacaca G/C aggccggcaccctgtcatca | 5226 | | |
| OCTN2 | 8 | intron 2 + (173-174) | tagtaagaagagccaacaaa TC/Δ atctgactccgtaattcttg | 5227 | | |
| OCTN2 | 9 | intron 2 + 608 | agcaggttatttgtataatt C/A taaagcttttaactcaagga | 5228 | | |
| OCTN2 | 10 | intron 2 + 4370 | taatttattgatatccaagt G/A ccctctataatagatgctca | 5229 | | |
| OCTN2 | 11 | intron 5 + 969 | caccagaaaggggtcctgtg C/T gcaaaggtcaggcaggagtg | 5230 | | |
| OCTN2 | 12 | exon 10 + (1028-1044) | ttagcctcctggtttgtgtc (T)16-18 aaaacagaatcactctggca | 5231 | | |
| OCT1 | 1 | intron 1 + 7715 | tagtcctgactcacacatgg G/T tctgtgcttttcgtcctcct | 5232 | | |
| OCT1 | 2 | intron 2 + 97 | ggtggagaacatgaccagtt G/A gaattaactgcagaagctgc | 5233 | | |
| OCT1 | 3 | intron 2 + 797 | gtggagttgtgtgaacaact C/G tttaaaagagtgtggggagg | 5234 | | |
| OCT1 | 4 | intron 2 + 1768 | cgtgaactggagagggtctg T/C gggcactgcccggctgagct | 5235 | | |
| OCT1 | 5 | intron 3 + 1244 | gcagatggtaaaggagcaga C/T gcggaaagcgacggtcaggg | 5236 | | |
| OCT1 | 6 | intron 4 + 865 | agcgtccagtggtaggaaag G/T ctccacaggtggcaatccca | 5237 | | |
| OCT1 | 7 | intron 4 + 1028 | gtcatctctgctcttctccc A/G cttcttcatttttatagtac | 5238 | | |
| OCT1 | 8 | intron 4 + 1040 | cttctcccacttcttcattt T/G tatagtactattggtattat | 5239 | | |
| OCT1 | 9 | intron 4 + 1485 | agcctgcccttcccctgcct C/T gtccttgtgaaacagggatc | 5240 | | |
| OCT1 | 10 | intron 4 + 1997 | tgagggattacagccccaac G/A tggggagggcaggctgcact | 5241 | | |
| OCT1 | 11 | exon 5 + 9 | tggtgttcgcaggtgtgtgc C/T ggagtcccctcggtggctgt | 5242 | | |
| OCT1 | 12 | exon 5 + 20 | ggtgtgtgccggagtcccct C/G ggtggctgttatcacaaaaa | 5243 | | |
| OCT1 | 13 | intron 6 + 379 | gaggaagttccattcctcat A/G tctaaacaccctagagaccc | 5244 | | |
| OCT1 | 14 | intron 6 + 2125 | tattgacccaaatctgttct C/A acaatgtaaatatgactgta | 5245 | | |
| OCT1 | 15 | intron 6 + (2935-2953) | tttctccatctgcgaggggc (T)18-20 cttcagtctctgactcatgc | 5246 | | |
| OCT1 | 16 | intron 7 + (6-7) | ttttatctcacctggtaagt (TGGTAAGT) tggtaagttgtctgctttc | 5247 | | |
| OCT1 | 16 | intron 7 + (6-7) | ttttatctcacctggtaagt ( tggtaagttgtctgctttc | 5248 | | |
| OCT1 | 17 | intron 7 + (1780-1781) | gttttcttttcccttttttt (T) catggagaaagaacagagaa | 5249 | | |
| OCT1 | 17 | intron 7 + (1780-1781) | gttttcttttcccttttttt catggagaaagaacagagaa | 5250 | | |
| OCT1 | 18 | intron 8 + 3247 | ccaggccaaacaattccatt G/T tcatggccactgggccaagg | 5251 | | |
| OCT1 | 19 | intron 8 + 10521 | cccttaaccaatgaacgcca G/A tggcagatccctcattctga | 5252 | | |
| OCT1 | 20 | intron 10 + 393 | tcagattctttagtaacttt G/C ttcacaaaattcttttgaca | 5253 | | |
| OCT1 | 21 | 3′flanking + 1755 | tgaatgatgtttttcaaatg T/C gtattaaaaatgtcctctct | 5254 | | |
| OCT1 | 22 | 3′flanking + 1799 | ctttcttagaatcctcttgg G/Δ caaaacttctgaggaaggcc | 5255 | | |
| OCT2 | 1 | intron 2 + 1329 | tggcagcagaagggaagagg G/Δ ataaaagtggaggcacaggc | 5256 | | |
| OCT2 | 2 | intron 2 + 1867 | cctctgtcaaggtaagtact C/Δ attattcttcccccaaaggc | 5257 | | |
| OCT2 | 3 | intron 9 + (340-343) | cagcaggcccctaactctct CTCT/Δ gctgatttccacccttcctg | 5258 | | |
| OCT2 | 4 | intron 9 − 396 | atacataattcattactttt A/G tttgctagaaatgatccaag | 5259 | | |
| OCT2 | 5 | intron 9 − 386 | cattacttttatttgctaga A/C atgatccaagtttctgactt | 5260 | | |
| OCT2 | 6 | intron 9 − 86 | atagaaaaatgctaaaaaaa A/Δ gttttaaacaaaaataaggg | 5261 | | |
| OCT2 | 7 | intron 10 + 1725 | tggaagaggcctttgaatcc G/A agcggaggtcacacactcgc | 5262 | | |
| OCT2 | 8 | intron 10 − 195 | caagataattttaggaataa C/T tctgtcgacatgagttatca | 5263 | | |
| OCT2 | 9 | exon 11 + 328 | gttttctggagggttttttt T/Δ ccatctttgtatttttttaa | 5264 | | |
| OCT2 | 10 | exon 11 + 427 | aggcaaacaaaatagaaaaa A/T gtgtgaaaaacagtaaagtt | 5265 | | |
| OCT2 | 11 | exon 11 + 455 | aaacagtaaagttgggagag G/A agcatctattttcttaaaga | 5266 | | |
| OCT2 | 12 | 3′flanking + 34 | agaatgtatgtcaagaattt T/A agataggcctttcagtaaca | 5267 | | |
| NTCP | 1 | exon 1 + 307 | tatggcatcatgcccctcac G/A gcctttgtgctgggcaaggt | 5268 | | |
| NTCP | 2 | intron 1 + 607 | cccagcacccactccagata G/C gccagccccatctcagccac | 5269 | | |
| NTCP | 3 | intron 1 + 702 | gcagaaatcagcaagggctc G/A ctcctggagacgcagcacac | 5270 | | |
| NTCP | 4 | intron 1 + (3950-3966) | cacatcacctaacagcttgc (T)14-17 gagaaataggcatgtaaaga | 5271 | | |
| NTCP | 5 | intron 1 + 5597 | aaggacatattattcaggct C/G tgagtgtcataatttatttt | 5272 | | |
| NTCP | 6 | intron 2 + 4808 | cctatggagaagcaactacc C/T ggggccacttgtctcagcag | 5273 | | |
| NTCP | 7 | intron 2 + 5032 | acacctggagactagcagag G/C cagctttcccaccaggatca | 5274 | | |
| NTCP | 8 | intron 2 + 5046 | gcagaggcagctttcccacc A/T ggatcatatcaaattatgtg | 5275 | | |
| NTCP | 9 | intron 3 + (8-21) | gcctcaatggacggtaggta (T)12-15 aagaaagggtctcactctgt | 5276 | | |
| NTCP | 10 | intron 4 + (484-495) | taatataacccagaataaag (A)10-13 gattcctcaactctagttac | 5277 | | |
| NTCP | 11 | intron 4 + (728-754) | tgcactttaacaccaatttt (A)25-27 caggacattcaaacccactt | 5278 | | |
| NTCP | 12 | intron 4 + 747 | taaaaaaaaaaaaaaaaaaa A/C aaaaaaacaggacattcaaa | 5279 | | |
| NTCP | 13 | intron 4 + 1339 | ccccagtggaaacactaaat C/A aaagcaacgtatttctttgg | 5280 | | |
| NTCP | 14 | intron 4 + 1545 | accacggacaagaagaggta G/C atcaattgggggttggaggg | 5281 | | |
| NTCP | 15 | 3′flanking + 559 | caagacaatatagttttcgg G/A tatcagtttggcaaatgtgc | 5282 | | |
| PEPT1 | 1 | exon 1 + 25 | ctgccaggagcacgtcccgc C/T ggcaggtcgcaggagccctg | 5283 | | |
| PEPT1 | 2 | intron 1 + 88 | cgagggccgggaggcgcgaa G/A ggtacgcggcggcgggaagc | 5284 | | |
| PEPT1 | 3 | intron 1 + 106 | aagggtacgcggcggcggga A/T gcggggcgacccgaaggccc | 5285 | | |
| PEPT1 | 4 | intron 1 + 248 | cgaggttgcgatcctggccc G/A cccgcccgtggggcactgta | 5286 | | |
| PEPT1 | 5 | intron 3 + 326 | tggagcgggacgggacccag C/A gggtgacggcaggggcggca | 5287 | | |
| PEPT1 | 6 | intron 1 + 1238 | tttagcatttccagcagatc C/T aatcccgagagctgttagag | 5288 | | |
| PEPT1 | 7 | intron 1 + 3001 | tcttatatgctgggaagaag C/T gtcagtaagaaaaagcagcc | 5289 | | |
| PEPT1 | 8 | intron 1 + 5673 | ttgggaagtgccacagccac G/C gggcacagggacagggtctt | 5290 | | |
| PEPT1 | 9 | intron 1 + 5679 | agtgccacagccacggggca C/G agggacagggtcttccacag | 5291 | | |
| PEPT1 | 10 | intron 1 + 5917 | aaattcacaaaatgtacttc C/T ataagaaggctcgttaaaag | 5292 | | |
| PEPT1 | 11 | intron 1 + 5966 | ctaggcatttagaacttcta C/T aatctgcccctagtgacaag | 5293 | | |
| PEPT1 | 12 | intron 1 + 9255 | tggtcatttcaggcctcttc A/G gcctatgattttagatagtt | 5294 | | |
| PEPT1 | 13 | intron 1 + 10278 | catgacccatgtaggcggga A/G aagcagccctgtagcagcag | 5295 | | |
| PEPT1 | 14 | intron 1 + 20251 | aagaagagcctgtgtttatt C/T agtgattgcaatgtgttggg | 5296 | | |
| PEPT1 | 15 | intron 1 + 20509 | aaacaccacttctgcatttg C/A gctttctaagatagcaatcc | 5297 | | |
| PEPT1 | 16 | intron 1 + 20532 | tttctaagatagcaatcctg T/C tgacacaggtacattaagat | 5298 | | |
| PEPT1 | 17 | intron 3 + 55 | agagcgggagtggccataac C/Δ agtcctaactttgtttcccc | 5299 | | |
| PEPT1 | 18 | intron 5 + 1720 | atcctctcttttactggaaa C/A aataaagctacaaaagaacc | 5300 | | |
| PEPT1 | 19 | intron 5 + 1790 | gctactgttttatgttttcc G/A gatggtaaattattagatgg | 5301 | | |
| PEPT1 | 20 | intron 5 + 1860 | agtttgcatttgactatcac G/A ctgcattcctgtgagctggc | 5302 | | |
| PEPT1 | 21 | intron 5 + 1943 | aggcccactgagggaaactg G/A ggaaaagagaggccttctac | 5303 | | |
| PEPT1 | 22 | intron 8 + 1478 | tgttttcagatcttagtagt A/G catggaataggaccgttttc | 5304 | | |
| PEPT1 | 23 | intron 8 + 1898 | ttaaatattagtggtaaaag A/G aaacatagactcaatctctt | 5305 | | |
| PEPT1 | 24 | intron 10 + 388 | ttaaatagtttagacatttt C/T gattttctaaagaaaactgc | 5306 | | |
| PEPT1 | 25 | intron 11 + 985 | atccataaggtactcagtga C/T tggcctgtatgaagaactca | 5307 | | |
| PEPT1 | 26 | intron 11 + (1022-1045) | ctcaaacaggggtagatttc (T)20-24 gagtcaagagtctcactctg | 5308 | | |
| PEPT1 | 27 | intron 11 + 1320 | tgtgagccactgcacctggc C/T aatttcctgactttctatga | 5309 | | |
| PEPT1 | 28 | exon 16 107 | tggagagatggtgacacttg G/C cccaatgtctcaagtaagta | 5310 | | |
| PEPT1 | 29 | intron 18 + 6048 | tttgttgttgggtttttttt T/Δ gttgttgttgttttgttttg | 5311 | | |
| PEPT1 | 30 | intron 18 + (6141-6142) | tcactgcagcctccgccccc (T) gggttcaagcaattatcctg | 5312 | | |
| PEPT1 | 30 | intron 18 + (6141-6142) | tcactgcagcctccgccccc gggttcaagcaattatcctg | 5313 | | |
| PEPT1 | 31 | intron 18 + (6241-6242) | tatttttagtagagacgggg (G) tttcaccatattggccaggc | 5314 | | |
| PEPT1 | 31 | intron 18 + (6241-6242) | tatttttagtagagacgggg tttcaccatattggccaggc | 5315 | | |
| PEPT1 | 32 | intron 18 + 12102 | gtgggaattctagctaaggc C/T cgtgtggatctgtctcaggt | 5316 | | |
| PEPT1 | 33 | intron 18 + 12203 | gacctgagtttaattcatag C/A cattttctcccagcacctaa | 5317 | | |
| PEPT1 | 34 | intron 18 + 12307 | gaaaggttaaattattcttt A/G cactgctgaggtgtacacta | 5318 | | |
| PEPT1 | 35 | intron 20 + 79 | tcacaaacacttaggacata A/G tatgatttaactagagtgat | 5319 | | |
| PEPT1 | 36 | exon 23 + (348-370) | tcttttttctttttcttttc (T)18-23 gagacagagttttgctcttg | 5320 | | |
| PEPT1 | 37 | exon 23 + 790 | ccacattggtcatcttccct A/G tcacacaaatgatgttattt | 5321 | | |
| PEPT1 | 38 | 3′flanking + 2 | aaataaatttctgttcttaa G/A cctaagtgttcatgtatctc | 5322 | | |
| EPHX1 | 1 | intron 1 + 110 | tgcaaaatgtgtcttactag C/T ttctagtgcataaaatattg | 5323 | | |
| EPHX1 | 2 | intron 1 + 143 | aaatattggtggagctcttc G/A ctgtgctgggccagtcacca | 5324 | | |
| EPHX1 | 3 | intron 1 + 1097 | aatccagagagggagataga T/G tggaagttcaagggtggaca | 5325 | | |
| EPHX1 | 4 | intron 1 + 1717 | ttccaagacagagcgagggg T/C gctgctggggcgtggtttgc | 5326 | | |
| EPHX1 | 5 | intron 1 + 1772 | aactcgatgctttctcctcc G/T tctgggtcctaactgcagtg | 5327 | | |
| EPHX1 | 6 | intron 1 + 2054 | gaaatgtaacaggcaacact A/G tggacacagaaagtagatta | 5328 | | |
| EPHX1 | 7 | intron 2 + 1414 | atttccaaaatctgtttggg G/T gtaactgaaacacttgggaa | 5329 | | |
| EPHX1 | 8 | exon 3 + 174 | taccctcacttcaagactaa G/A attgaaggtatgtttgcaaa | 5330 | | |
| EPHX1 | 9 | intron 3 + 6583 | ctgtcaataccatgaagggg G/C ggcgggggcactaagggtgg | 5331 | | |
| EPHX1 | 10 | intron 4 + 34 | agaggttccataactgcccc G/A tcctcgccaagggtgggccc | 5332 | | |
| EPHX1 | 11 | intron 4 + 63 | aagggtgggcccggtgttcc C/T accaggctctccttccggcg | 5333 | | |
| EPHX1 | 12 | intron 5 + 154 | gcagtgcctgaggcacgttg G/A cttggatcctcctgtctgta | 5334 | | |
| EPHX1 | 13 | intron 5 + 276 | tgctggaccaagctctggga T/C agccctgagcagaactcccc | 5335 | | |
| EPHX1 | 14 | exon 6 + 130 | gatgtggagctgctgtaccc C/T gtcaaggagaaggtattcta | 5336 | | |
| EPHX1 | 15 | intron 8 + 206 | ggtgcctggctcccgggcgg C/A cctcagtaccgctccccagt | 5337 | | |
| EPHX1 | 16 | intron 8 + 353 | tggccctcccagaaaagaga A/G ggccctcagtgaggggagag | 5338 | | |
| EPHX1 | 17 | 3′flanking + 708 | aggtgcagactcatgcactc A/G gccctgaagaggtgagagag | 5339 | | |
| EPHX2 | 1 | 5′flanking − (523-522) | aaagtcactggatatgcccc (C) tcccccgccccccaacacgg | 5340 | | |
| EPHX2 | 1 | 5′flanking − (523-522) | aaagtcactggatatgcccc tcccccgccccccaacacgg | 5341 | | |
| EPHX2 | 2 | 5′flanking − 522 | aaagtcactggatatgcccc T/C cccccgccccccaacacggt | 5342 | | |
| EPHX2 | 3 | 5′flanking − 521 | aagtcactggatatgcccct C/T ccccgccccccaacacggtc | 5343 | | |
| EPHX2 | 4 | 5′flanking − 516 | actggatatgcccctccccc G/C ccccccaacacggtcttatg | 5344 | | |
| EPHX2 | 5 | 5′flanking − 515 | ctggatatgcccctcccccg C/G cccccaacacggtcttatgt | 5345 | | |
| EPHX2 | 6 | intron 1 − 74 | tggctgcttctcaatgaata T/C gaacagtgtctgtttccatg | 5346 | | |
| EPHX2 | 7 | intron 3 + 72 | gagcattaggtcagaatcca T/C tgaagtgagctttgagatca | 5347 | | |
| EPHX2 | 8 | intron 4 + 473 | gtgtgtctctactttaatct A/G caaaaggtgattgaatggag | 5348 | | |
| EPHX2 | 9 | intron 5 + 276 | caagagtgggatgttcaagg C/T catcctgacctcacttttga | 5349 | | |
| EPHX2 | 10 | intron 8 + 8 | tctgctcctcccggtgggtg T/C gctgtcttgcagctgtctta | 5350 | | |
| EPHX2 | 11 | intron 9 + 1573 | atgtcgtgaagactgatgaa C/T gatggacggctgcactgctc | 5351 | | |
| EPHX2 | 12 | intron 10 + 207 | gaacaggatggagatgagct T/C gtttatttgtcttttaatga | 5352 | | |
| EPHX2 | 13 | intron 12 + 911 | tgaagagacctcgacatgtc G/T catcccacatactacaggga | 5353 | | |
| EPHX2 | 14 | intron 12 + 2425 | atcttctcagctgagcaaac C/T gaggctcagagggcttaacc | 5354 | | |
| EPHX2 | 15 | intron 12 + 2460 | ttaaccccaactggcccaag G/A ccaggtacatgattgggtca | 5355 | | |
| EPHX2 | 16 | intron 12 − 281 | aagtcctttcaagagattat T/C ataagtagtaccttctcatt | 5356 | | |
| EPHX2 | 17 | intron 12 − 268 | agattattataagtagtacc T/G tctcattataggaatattga | 5357 | | |
| EPHX2 | 18 | exon 13 + 50 | cctgagtcggactttcaaaa G/T cctcttcagagcaagcgatg | 5358 | | |
| EPHX2 | 19 | intron 13 + 1739 | ttgtcgtaacagggttttca G/T atgagcatatttcctttgta | 5359 | | |
| EPHX2 | 20 | exon 14 + 33 | atgcataaagtctgtgaagc G/A ggtaagagacatgcttggga | 5360 | | |
| EPHX2 | 21 | intron 14 + 314 | ggattgagagcttacctcta T/C gggggtcacctcgtgtatgc | 5361 | | |
| EPHX2 | 22 | intron 14 + 878 | attcccttattccttcacac C/T gtctgtcactcattcattca | 5362 | | |
| EPHX2 | 23 | intron 14 + 948 | gcacaggctgggtatgaagc T/C ggggctgcatgctcagctac | 5363 | | |
| EPHX2 | 24 | intron 15 + 259 | agagggttttcactactttt C/T agtcatggctcctcagagaa | 5364 | | |
| EPHX2 | 25 | intron 16 + 459 | tcctcatttgtcaagcagaa G/C atgagtttccaatctctggg | 5365 | | |
| EPHX2 | 26 | intron 16 + 645 | gtaagtgaacacactgctac G/A tgccagacttcctgccagac | 5366 | | |
| EPHX2 | 27 | intron 16 + 985 | gtcattatcatcatatgacc G/A atgaaaatgaccaaactgca | 5367 | | |
| EPHX2 | 28 | 3′flanking + 12 | aggtggccttacacacatct T/C gcatggatggcagcattgtt | 5368 | | |
| EPHX2 | 29 | 3′flanking + 374 | tgttcacggagaatgcacgg C/T atggggatgaaccctttccc | 5369 | | |
| EPHX2 | 30 | 3′flanking + 544 | tagccacctgcctttctccc G/A gcttccctagcagagtttgc | 5370 | | |
| COMT | 1 | 5′flanking + 1287 | cgtatgatattccccattct G/A agtccagaatacctagaaat | 5371 | | |
| COMT | 2 | 5′flanking + 1217 | tgtgagtatgggaaggggaa G/A cttttctgtctgttgtcccc | 5372 | | |
| COMT | 3 | 5′flanking − 503 | caggggctccaggaggacga G/A tgtgtatcctcccattgctc | 5373 | | |
| COMT | 4 | 5′flanking − 425 | gagaagttgggaagtctggc C/T agtggggccggtgcctggtg | 5374 | | |
| COMT | 5 | 5′flanking − 277 | cccagccccagtttccccac C/T tgggaagggggctacttgtg | 5375 | | |
| COMT | 6 | intron 1 + 12058 | ctggcccatggaagggaggg G/A agggggccccgacggggcca | 5376 | | |
| COMT | 7 | intron 1 + 12070 | agggaggggagggggccccg A/G cggggccacagtaaaggagt | 5377 | | |
| COMT | 8 | intron 1 + 18831 | tgtgtatgttcttggtaaac C/T agcccttggtcttacacatc | 5378 | | |
| COMT | 9 | intron 2 + 832 | cctctcctttggccacccgt G/C actacccccaactccgggcc | 5379 | | |
| COMT | 10 | intron 3 + 90 | ggagaagctgttatcacccc A/G cggggccacagtaaaggagt | 5380 | | |
| COMT | 11 | intron 3 + 425 | ccccaaggtgggcggttcgg T/G gattcagagagggcagctct | 5381 | | |
| COMT | 12 | intron 3 + 671 | ggctcctgctctttgggaga G/A gtggggggccgtgcctgggg | 5382 | | |
| COMT | 13 | intron 3 + 676 | ctgctctttgggagaggtgg G/T gggccgtgcctggggatcca | 5383 | | |
| COMT | 14 | intron 5 + 75 | tcagcctcagcctctccaaa G/C agccaggcattccagtagag | 5384 | | |
| COMT | 15 | intron 5 + 310 | accagacaccagggcagaaa C/T ggcacaggaccaaggagatg | 5385 | | |
| COMT | 16 | intron 5 + 346 | agatggggtggggaagggcc G/A ctctgggcccagcctgctct | 5386 | | |
| COMT | 17 | intron 5 + 3023 | aaggcagccgccctgctcaa G/A gcctaggccattgtcctcct | 5387 | | |
| GAMT | 1 | intron 1 + 429 | ctcggaaagctgagctcagg G/A agacagctgtccccggggtg | 5388 | | |
| GAMT | 2 | intron 5 + 1411 | ggtgacctggtgccatcccc G/A accaggagacgcaggtgccc | 5389 | | |
| GAMT | 3 | 3′flanking + 626 | cactgacctccttgccctga G/A agaaggccggctcctgtgct | 5390 | | |
| PNMT | 1 | intron 1 + 429 | ctcggaaagctgagctcagg G/A agacagctgtccccggggtg | 5391 | | |
| PNMT | 2 | intron 1 + 35 | ctgaggcacgagggacaaga G/T gtcgtcgggggatgaaagca | 5392 | | |
| HNMT | 1 | 5′flanking − 211 | cagaggcagatgacagtctt C/T cgttaaagatttcactgctg | 5393 | | |
| HNMT | 2 | intron 1 + 5409 | aatataactgatataattgg A/G acatttcatgttggcctagt | 5394 | | |
| HNMT | 3 | intron 2 + 2561 | cacttgtgcttggacaagaa A/G agaaggcctacaagaaaaag | 5395 | | |
| HNMT | 4 | intron 2 + 2895 | caatcagaaatgtaagaaaa A/C ctccaagaaaaatttaagtt | 5396 | | |
| HNMT | 5 | intron 2 + 3977 | accaaacttggaagtgtaaa G/A ttatgcatgtatgttcatgt | 5397 | | |
| HNMT | 6 | intron 2 + 5296 | ttaacatagtgagtttggag T/C cccaggattttattttcctt | 5398 | | |
| HNMT | 7 | intron 2 + 13317 | caaccctcatgaattcttag C/T tgggatgggtccctataaca | 5399 | | |
| HNMT | 8 | intron 2 + 14682 | gtagatgagcaaatgagttc A/Δ ggagagatttaaatacccta | 5400 | | |
| HNMT | 9 | intron 2 + 15406 | gtctatgcattcatgcatcc G/A tctaaccagctgtctaccta | 5401 | | |
| HNMT | 10 | intron 2 + 28943 | atgtgacttaaacttcaggt A/G tatcaatatcccttgaatgt | 5402 | | |
| HNMT | 11 | intron 4 + 49 | cagaaagaagacttttcaga A/G tatatatataatgaatatct | 5403 | | |
| HNMT | 12 | intron 4 + (1942-1943) | tttgagaaaaatttaaggta (A) tcttctatggcccacttcca | 5404 | | |
| HNMT | 12 | intron 4 + (1942-1943) | tttgagaaaaatttaaggta tcttctatggcccacttcca | 5405 | | |
| HNMT | 13 | intron 4 + 2405 | ccctgtgaccaagcagataa C/A ctcatgctttatttagtcca | 5406 | | |
| HNMT | 14 | intron 5 + (80-81) | cctgtgtttgaaagaagctt (TT) atatattttgtcttcattat | 5407 | | |
| HNMT | 14 | intron 5 + (80-81) | cctgtgtttgaaagaagctt atatattttgtcttcattat | 5408 | | |
| HNMT | 15 | intron 5 + 235 | ctttcttttgggaaaatatg T/C ctttgtcttctatatatgaa | 5409 | | |
| HNMT | 16 | intron 5 + (702-703) | tacttacaggttgattttag (AT) acacagcagactctgtcttc | 5410 | | |
| HNMT | 16 | intron 5 + (702-703) | tacttacaggttgattttag acacagcagactctgtcttc | 5411 | | |
| HNMT | 17 | intron 5 + 749 | ttacaccagaccccatactt T/G aacaccatatgtcacaaaat | 5412 | | |
| HNMT | 18 | intron 5 + 1101 | gtaggcagcctattcttgat T/G atattcatcaatcatacaga | 5413 | | |
| HNMT | 19 | intron 5 + 1137 | acagaaaaagtattgtagac G/A gaaataacaattcattgaga | 5414 | | |
| HNMT | 20 | intron 5 + 1348 | aagggagcatgaatagtcca C/G aagtaactgagaactgatta | 5415 | | |
| HNMT | 21 | intron 5 + 1673 | caaaagaaagggagtaaaga C/G tcaacaatcagttagctttt | 5416 | | |
| HNMT | 22 | intron 5 + 2022 | attttatttggggctttcta C/T gtctctctctcctaagccta | 5417 | | |
| HNMT | 23 | intron 5 + 2285 | tgtcatacttaactcttaaa G/C atccagagtaaatgatggag | 5418 | | |
| HNMT | 24 | intron 5 + 4159 | taccagttgacccagcaacc C/T tcttatagagtagtttaaat | 5419 | | |
| HNMT | 25 | intron 5 + 4501 | aatgatccacaaaattacta C/G tcattgttttctttcaatga | 5420 | | |
| HNMT | 26 | intron 5 + 5251 | cacacacacacacacacaca C/G caaatggaagcagccagaca | 5421 | | |
| HNMT | 27 | intron 5 + 5802 | gaaaaagaaaatctggctta C/T tataagaccaagagtcatct | 5422 | | |
| HNMT | 28 | intron 5 + 6189 | tccaattccaccttctccta G/C agcatatcctgcagttacct | 5423 | | |
| HNMT | 29 | intron 5 + 6297 | gtcttggttcatctcttgag T/A taaattagatctgggaactt | 5424 | | |
| HNMT | 30 | 3′flanking + 458 | tatgtcactctcaagaactc C/T tataagaccaagagtcatct | 5425 | | |
| HNMT | 31 | 3′flanking + 993 | ctgaaaatgaacactgaacc G/A ttaatcatactgatatgtac | 5426 | | |
| HNMT | 32 | 3′flanking + 1793 | gtggagcacagcattttagg G/A cttgatatttgcttattata | 5427 | | |
| NNMT | 1 | 5′flanking − 228 | ataattttcctgacgagctc A/T agtgctccctctggtctaca | 5428 | | |
| NNMT | 2 | intron 1 + 44 | ccccactaatgtgagtcata T/C agatggagtctcagggcacg | 5429 | | |
| NNMT | 3 | intron 1 + 149 | ggataaaaacgaatattggt A/G tagcgattccacagtttaca | 5430 | | |
| NNMT | 4 | intron 2 + 158 | agataggcccatgtgtgtgc G/A tgttagtaaatttgtgtatg | 5431 | | |
| NNMT | 5 | intron 2 + 433 | gctgtagccatccaagccta T/C agaacttggctgtgagtgtg | 5432 | | |
| NNMT | 6 | intron 2 + 10826 | atcatctgactggtaagttc C/T agttctgtggtaactcaagt | 5433 | | |
| NNMT | 7 | intron 2 + 13630 | atttcatggagggaagtcca T/C ggtagaagcaggctgctagg | 5434 | | |
| NNMT | 8 | 3′flanking + 71 | ggctcagtggttggggccca A/G tggttcatctaggacgggac | 5435 | | |
| PEMT | 1 | intron 1 + (297-299) | attgtgtgagactcagaggt TGT/Δ ccgtgttagtctttgggatt | 5436 | | |
| PEMT | 2 | intron 1 + 817 | tcatgaagcctgtaaggcac A/G tctctgccccaagcagcttc | 5437 | | |
| PEMT | 3 | intron 1 + 830 | aaggcacatctctgccccaa G/A cagcttctaatccagttctt | 5438 | | |
| PEMT | 4 | intron 1 + 1035 | gagttctctgaaggagctaa T/C accagttagtgttttgaaga | 5439 | | |
| PEMT | 5 | intron 1 + 1573 | agtgggcaggggagactaac C/T gggtgtgtgaggggtgggct | 5440 | | |
| PEMT | 6 | intron 1 + 1759 | gatttttcttaaagaaagaa A/G gaaagaaacatacaacatac | 5441 | | |
| PEMT | 7 | intron 1 + 2768 | gcatcttgctgtccacaggc C/A ggggcacctccaggattcag | 5442 | | |
| PEMT | 8 | intron 1 + 2785 | ggccggggcacctccaggat T/C cagaagatgactccagtagg | 5443 | | |
| PEMT | 9 | exon 1 + 162 | agctcagcagacctcctggc C/T gtggtgggtagctcctttcc | 5444 | | |
| PEMT | 10 | intron 2 + 4598 | ccgtgggttttttttttttt t/Δ cttcatttctttggttgctg | 5445 | | |
| PEMT | 11 | intron 4 + 39 | actgtccagacgggagtatc C/T cactgcttggtgagccccac | 5446 | | |
| PEMT | 12 | intron 4 + 1317 | accgtccccagctggcccca G/A cctcctgacatgggcctctg | 5447 | | |
| PEMT | 13 | intron 4 + 1355 | ctggagccaggctgcagccg A/C agtgcctggccatcctggcg | 5448 | | |
| PEMT | 14 | intron 4 + 5925 | gtccaggcactgtggcccta C/T gtgggagtctccagtctcca | 5449 | | |
| PEMT | 15 | intron 4 + 6028 | ggcagtggtccaaggaccag G/C atggactccctcttctcacc | 5450 | | |
| PEMT | 16 | intron 4 + 6078 | atctgtaccctcgcggactc C/T acctggcttcgtgccatcac | 5451 | | |
| PEMT | 17 | intron 4 + 6089 | cgcggactctacctggcttc A/G tgccatcacccccgccagat | 5452 | | |
| PEMT | 18 | intron 4 + 6379 | tcaggtgtcccctccctcat G/A cctcctcaccctgccctctc | 5453 | | |
| PEMT | 19 | intron 4 + 7339 | tgtaaggaatcctgccaaga C/T ggcagatgcacacggggtca | 5454 | | |
| PEMT | 20 | intron 4 + 7619 | ctcctgcacatgtgctccag A/G gaggaaaggcatttgacagg | 5455 | | |
| PEMT | 21 | intron 4 + 8858 | ggcatgtgtgtgtgtgtgta T/G gtgtgtgagtgtgtgcatgt | 5456 | | |
| PEMT | 22 | intron 4 + 9029 | tttctggaccagaaagcgtc G/A tcctctgccagggcctcttg | 5457 | | |
| PEMT | 23 | intron 4 + 9056 | gccagggcctcttgcacttg C/T gggaaagctgagctgagctg | 5458 | | |
| PEMT | 24 | intron 4 + 9512 | ctgagctgggcagcagcatt A/G ctctgtgtgctgctggcact | 5459 | | |
| PEMT | 25 | intron 4 + 9523 | agcagcattactctgtgtgc T/C gctggcactggcctggtggg | 5460 | | |
| PEMT | 26 | intron 4 + 9622 | gacaaagtgtacaacaaggt G/A tctcgaactgggtcagctca | 5461 | | |
| PEMT | 27 | intron 4 + 10776 | ccattcctgggtcttctttg G/A aggctgaatgaaattccatg | 5462 | | |
| PEMT | 28 | intron 4 + 10912 | tctgccccactttgctcaga G/C gtgcaacaaggccttcagga | 5463 | | |
| PEMT | 29 | intron 4 + 11590 | ggacactggcctgatgcaga G/C gtgtggtctctctcctgcag | 5464 | | |
| PEMT | 30 | intron 4 + 12090 | ggccagggcacccctaccag G/C ctgagtcccacctgtccagc | 5465 | | |
| PEMT | 31 | intron 4 + 12263 | tacccgccttcccagatgga G/A cgggctgctcatgggactta | 5466 | | |
| PEMT | 32 | intron 4 + 12448 | tctggtcccctctcctgctt G/A tagtttcctgggctaaaatc | 5467 | | |
| PEMT | 33 | intron 4 + 12730 | tgggaccagtgccgccacca C/T ggcccaaggacctggtgttc | 5468 | | |
| PEMT | 34 | intron 4 + 13240 | gggctccaggcacacagcgg T/C cccagtacacctgtcgcttt | 5469 | | |
| PEMT | 35 | intron 4 + 13494 | tccgtggaactcagagatgg T/C acctccctgcgaggtggggc | 5470 | | |
| PEMT | 36 | intron 4 + 13817 | aactctcccctgctgctgag A/G cagatcttggagcctcggcc | 5471 | | |
| PEMT | 37 | intron 4 + 14773 | ccgccctgtgcttcatgccc C/T ctatgcctctcactgcctgg | 5472 | | |
| PEMT | 38 | intron 4 + 14951 | gtcctgaggcccctcccacc G/A ggggcttctcaaccacacac | 5473 | | |
| PEMT | 39 | intron 4 + 16896 | gctgtgactgtcttggagac T/C gggtcttggcgggcctggtg | 5474 | | |
| PEMT | 40 | intron 4 + 19439 | ccaggagcctctgaggcagc G/A ggggcttctcaaccacacac | 5475 | | |
| PEMT | 41 | intron 4 + 19557 | attttgtcagcatgtcacgt C/T cctttcataatgaagcaagg | 5476 | | |
| PEMT | 42 | intron 4 + 20051 | acagcactgcgggagccacg A/G catctgcagacgcatttgat | 5477 | | |
| PEMT | 43 | intron 4 + 20816 | tggactctctggcgtccatc C/T agccacttcagtgcgacgtg | 5478 | | |
| PEMT | 44 | intron 4 + 21196 | ggctggctgggccctgggat C/G atcgtgacaggctttagtgg | 5479 | | |
| PEMT | 45 | intron 4 + 21528 | acaggtgggagccgaggctc G/T ggaggtgggccgggctgagc | 5480 | | |
| PEMT | 46 | intron 4 + 21596 | ccgcttccccgtgctctggc C/T gtagcagaaagtgtcccact | 5481 | | |
| PEMT | 47 | intron 4 + 22672 | agcctcccactgccttgtgg C/T tgaggggagggggccgggtc | 5482 | | |
| PEMT | 48 | intron 4 + 22713 | tctaacgctgtcttctttgt A/T ctgaaaaccaaacaccttct | 5483 | | |
| PEMT | 49 | intron 4 + 23010 | tgccgggcagcggggaggga G/A ggcgagtggttcccccaagt | 5484 | | |
| PEMT | 50 | intron 4 + 23588 | gtgcaggcgccctgcatccc C/T gcagccaagttctgggcgga | 5485 | | |
| PEMT | 51 | intron 4 + 23627 | gacactgccctgagccagga C/T ggtgaggtgggacgccttcc | 5486 | | |
| PEMT | 52 | intron 4 + 23941 | tgaggggttgggactctaca G/A aggagagtggactcacgggg | 5487 | | |
| PEMT | 53 | intron 4 + 24091 | gacacctcttcactgtcagc G/T ctgagacacgcccctgccct | 5488 | | |
| PEMT | 54 | intron 4 + 25348 | caggccagttggaatcctac G/A tagagtgaaagcatctcagc | 5489 | | |
| PEMT | 55 | intron 4 + 25603 | taagcagttaacactgatgc G/A tgatgaaaattccaacagca | 5490 | | |
| PEMT | 56 | intron 4 + 31540 | cctccaggtggcaggaacac T/C gtgaggagcatgcaacgtgc | 5491 | | |
| PEMT | 57 | intron 4 + 31637 | gtgggctgggacgccaggac G/A gtgaggggcttcaaggtgtg | 5492 | | |
| PEMT | 58 | intron 4 + 31642 | ctgggacgccaggacggtga G/A gggcttcaaggtgtgtttgt | 5493 | | |
| PEMT | 59 | intron 4 + 35593 | ggaggagctgaaagagctgg G/A gctcgggatcaggtggttca | 5494 | | |
| PEMT | 60 | intron 4 + 35647 | actttgaggcaccaccgcac C/A tgtccgtgcgtgagggagac | 5495 | | |
| PEMT | 61 | intron 4 + 35862 | tcccagtggtggctctgtcc C/T cgtctcagccgagcactcag | 5496 | | |
| PEMT | 62 | intron 4 + 35882 | ccgtctcagccgagcactca T/G cggccagggtggctggactc | 5497 | | |
| PEMT | 63 | intron 4 + 37141 | ccacaggccggatgccttga T/C acttctcagctgcagggctg | 5498 | | |
| PEMT | 64 | intron 4 + 38862 | tggagagaccacctcagaca C/G caaggacgggcatgccatgg | 5499 | | |
| PEMT | 65 | intron 4 + 38872 | acctcagacagcaaggacgg G/T catgccatgggtcccggcag | 5500 | | |
| PEMT | 66 | intron 4 + 39140 | atgtctcaaatctccctccc C/T gggaaatctaggcacaggtc | 5501 | | |
| PEMT | 67 | intron 4 + 39635 | caggcccaggagcaggtggg G/T cctcctcacaggagcagggc | 5502 | | |
| PEMT | 68 | intron 4 + 39713 | actctgagcatgctggctcc C/T tccttctttccagggcagca | 5503 | | |
| PEMT | 69 | intron 4 + 40436 | cctggttgtgcttcggaccc G/A gaggcagacagaggaggcct | 5504 | | |
| PEMT | 70 | intron 4 + 47485 | acaatgactgttggagccct C/T gagcaggctgtgtcacgtgg | 5505 | | |
| PEMT | 71 | intron 4 + 48131 | actgggggatcctgaatccc G/A cctcctgatgccagtggagc | 5506 | | |
| PEMT | 72 | intron 4 + 48558 | cacagtgtgaactgttaggc C/G acagccacatcttgccggag | 5507 | | |
| PEMT | 73 | intron 4 + 48702 | gagatgggggcggttcggga G/A gcaaaagcaggaaggcagaa | 5508 | | |
| PEMT | 74 | intron 4 + 50302 | gcatgtgcatgggcagaggc T/C gttcccatctgagtgggacc | 5509 | | |
| PEMT | 75 | intron 4 + 54102 | ggccgcgtgctcctgcagcc A/T tgggctcctctggcagttct | 5510 | | |
| PEMT | 76 | intron 4 + 54220 | cccagggacagatcttctcc G/A ccagacgtctctttctgcct | 5511 | | |
| PEMT | 77 | intron 4 + 54371 | gcagataatgtgcagctggg G/A tgcatgtggttgttgctccc | 5512 | | |
| PEMT | 78 | exon 5 + 79 | tggcctgctactctctaagc G/C tcaccatcctgctcctgaac | 5513 | | |
| PEMT | 79 | intron 5 − 6796 | ggaggaagtcagcttcttac A/C gatggtggctcccagctttc | 5514 | | |
| PEMT | 80 | intron 5 − 6636 | ttttctcctctcaccttttg T/C gttcagaggcagaggtgtgc | 5515 | | |
| PEMT | 81 | intron 5 − 6448 | gttgggccaggctctgacag G/A accctcgggaccagctcctg | 5516 | | |
| PEMT | 82 | intron 5 − 5218 | ggagccctggctgaagaagc C/G ttacgaccaaggcctggagg | 5517 | | |
| PEMT | 83 | intron 5 − 4824 | ggacaggccgggggttgagc G/A gctgcatgaaggagggaggg | 5518 | | |
| PEMT | 84 | intron 5 − 4249 | tcaccagagtgatttcctcg C/A ggcaggtgcctggggtagcc | 5519 | | |
| PEMT | 85 | intron 5 − 4230 | gaggcaggtgcctggggtag C/T cactgggcggggtccatgag | 5520 | | |
| PEMT | 86 | intron 5 − 4182 | ggagagtaaggggtgggggg G/A cacttaggacagggaagctg | 5521 | | |
| PEMT | 87 | intron 5 − 3369 | ccaggtggggccgtgtgcct G/C tggcctggtgtgtggcccag | 5522 | | |
| PEMT | 88 | intron 5 − 2625 | cagggaagctgggccctgaa C/T gagctgggcttttgggccac | 5523 | | |
| PEMT | 89 | intron 5 − 1200 | attattgtgagcatgggaag A/T gcacatttggtcacacatgt | 5524 | | |
| PEMT | 90 | intron 6 + 606 | gcctggctagacgcccacca A/G tgaccctgatgatggcagca | 5525 | | |
| PEMT | 91 | intron 6 + 1229 | tttggtccaggaagggggac G/A gcagccaggagcgtctggat | 5526 | | |
| PEMT | 92 | intron 7 + 716 | atggagatgtgctcccccgg C/G gggtcagaggacctgcggtc | 5527 | | |
| PEMT | 93 | intron 7 + 1537 | ctctgggggacgcataagcc G/A cctccagaggacatcagcca | 5528 | | |
| PEMT | 94 | intron 7 + 1718 | gggcttccaggtgtctgagc T/C ccccggcatgtaggacccca | 5529 | | |
| PEMT | 95 | intron 7 + 2695 | ggctttgggggaccctggac C/T catttctagaaaacagcctt | 5530 | | |
| PEMT | 96 | intron 8 + 140 | ccagggctcccaggtcagag C/T ggccatggtagcttacaatg | 5531 | | |
| PEMT | 97 | 3′flanking + 179 | tacttaggaggcgtcagggg C/T tcacctggccatggccatgg | 5532 | | |
| PEMT | 98 | 3′flanking + 394 | gatgacactgtcattcctaa A/G tgaatggccttgtgctgacc | 5533 | | |
| ALDH1A1 | 1 | intron 1 + 564 | cattatttcttcaaccaagt T/C tgttgccattggaacagata | 5534 | | |
| ALDH1A1 | 2 | intron 1 + 710 | gttctgagagtaactctgaa C/T tttgcctgtttcacactgct | 5535 | | |
| ALDH1A1 | 3 | intron 1 + 3868 | ccctttttatatccagaata C/G aacctaaacttctttctcta | 5536 | | |
| ALDH1A1 | 4 | intron 2 + 2933 | taagtatgctatactatatt T/C gatagatatactatactata | 5537 | | |
| ALDH1A1 | 5 | intron 2 + 1646 | caatgtgattaactgaatac C/T gcaaatatgcactatatatg | 5538 | | |
| ALDH1A1 | 6 | exon 3 + 54 | caggcttttcagattgaatc C/T ccgtggcgtactatggatgc | 5539 | | |
| ALDH1A1 | 7 | intron 3 + 157 | taggccccttaacattgaac T/G attctcaaatagtaatctgc | 5540 | | |
| ALDH1A1 | 8 | intron 3 + 339 | tgagtctcctagaatgatat G/A ttaggtttattcaagcattt | 5541 | | |
| ALDH1A1 | 9 | intron 3 + 655 | agcaattagatgagtcagag C/A ataatatagttgggggaggg | 5542 | | |
| ALDH1A1 | 10 | intron 3 + 735 | gaagccaatttaacataaac C/A aataccaagatcaggtttca | 5543 | | |
| ALDH1A1 | 11 | intron 3 + 863 | acaagtatggttaatcaaag G/A accatttattactcaaatat | 5544 | | |
| ALDH1A1 | 12 | intron 3 + 1757 | agatgacaagatttcttcta T/A ttcaaaaattccctagcaca | 5545 | | |
| ALDH1A1 | 13 | intron 5 + 90 | ttctctaaaacagatagatg C/A ttatgtatttgttaaatgtg | 5546 | | |
| ALDH1A1 | 14 | intron 6 + 213 | caggaagccaaacacaaaag T/C ttggtgtcaaacagtcaact | 5547 | | |
| ALDH1A1 | 15 | intron 6 + 1323 | ttttgaattaaattcttata C/T tgtaacttttaaacttttta | 5548 | | |
| ALDH1A1 | 16 | intron 7 + 638 | gcaaaagaaagtggtggaag C/A atactgtaccatgcaaaaaa | 5549 | | |
| ALDH1A1 | 17 | intron 9 + (1462-1463) | aatggaattctatgtttttt (T) gttgtgattatttatctatc | 5550 | | |
| ALDH1A1 | 17 | intron 9 + (1462-1463) | aatggaattctatgtttttt gttgtgattatttatctatc | 5551 | | |
| ALDH1A1 | 18 | intron 9 + 1757 | tgatctagaatttagtttct A/G taaatgaatagaatccagtg | 5552 | | |
| ALDH1A1 | 19 | intron 12 − 1383 | aatcccacttattactctcc T/G gagagcttcaagtacctata | 5553 | | |
| ALDH1A1 | 20 | 3′flanking + 40 | ttttaagtacaagttttggt T/C acagtgatttcttcttgtca | 5554 | | |
| ALDH1A2 | 1 | 5′flanking − 716 | cagggatcctcattctgagc C/G cgaggcgagggggactcgca | 5555 | | |
| ALDH1A2 | 2 | intron 1 + 314 | cggtcccgactgccacgggg G/Δ aaggcgtcggaaccacttag | 5556 | | |
| ALDH1A2 | 3 | intron 1 + (664-675) | ttttgaactgaagaacttac (T)11-13 ataacgaacattgacatctt | 5557 | | |
| ALDH1A2 | 4 | intron 1 + 1370 | gcatgcagcttagaagtttt A/G ttttatgagggtctctaacc | 5558 | | |
| ALDH1A2 | 5 | intron 1 + 1557 | ggtacgtttttcagaattta A/Δ tttggaagctcttccaattc | 5559 | | |
| ALDH1A2 | 6 | intron 1 + 1934 | tcagctctttagtgagactt C/G taaattttctaagacaagca | 5560 | | |
| ALDH1A2 | 7 | intron 1 + (1971-1980) | agcataatagacaagcagta (T)9-11 aaacgtgaagagcaaaagct | 5561 | | |
| ALDH1A2 | 8 | intron 1 + 2295 | tactgtaagacaatatgtta T/C tgttttttgtcttgctaaac | 5562 | | |
| ALDH1A2 | 9 | intron 1 + 2387 | ttgggacccacatagagtca C/T tacttaaaataaatgaccag | 5563 | | |
| ALDH1A2 | 10 | intron 1 + 2841 | aggaatgtgctttttaaaac T/Δ agatggtgttagtcaaggag | 5564 | | |
| ALDH1A2 | 11 | intron 1 + 3035 | gacttttataattttgtata A/G ctgatattataggaatacac | 5565 | | |
| ALDH1A2 | 12 | intron 1 + 3319 | aaagagttatgttttttttt T/Δ ctgcatctgatattatatgg | 5566 | | |
| ALDH1A2 | 13 | intron 1 + 3474 | ttgtctttttatttattcat T/C taaacttctgttttctgagg | 5567 | | |
| ALDH1A2 | 14 | intron 1 + 4186 | ccttccaaacctttacttaa G/C attgtctgttttagtcataa | 5568 | | |
| ALDH1A2 | 15 | intron 1 + 4222 | cataacttgtcagtcaaact A/G catgttaatagagaacttca | 5569 | | |
| ALDH1A2 | 16 | intron 1 + 4254 | aggacttcaggttttttttt T/Δ aaatactttttcataactat | 5570 | | |
| ALDH1A2 | 17 | intron 1 + 4397 | cccttccactacatgggcct A/G tgttaccatgtgaaattatc | 5571 | | |
| ALDH1A2 | 18 | intron 1 + 5935 | aactccaggttgcaaataga T/C gtttctggtattttaagtag | 5572 | | |
| ALDH1A2 | 19 | intron 1 + 6206 | ttttgaaagcoctcctagca T/G ttctttaatttctttattga | 5573 | | |
| ALDH1A2 | 20 | intron 1 + 9559 | agataaattgatgaattatt C/T actctgtgctgctgatagat | 5574 | | |
| ALDH1A2 | 21 | intron 1 + (9631-9632) | taaaaagaatttctaaaaga (AAGA) ccttttttttgaataactct | 5575 | | |
| ALDH1A2 | 21 | intron 1 + (9631-9632) | taaaaagaatttctaaaaga ccttttttttgaataactct | 5576 | | |
| ALDH1A2 | 22 | intron 1 + 12731 | ctgaaatagaaacctttcag T/A gtaccttgcagagcagtgaa | 5577 | | |
| ALDH1A2 | 23 | intron 1 + 13442 | cagtgtcataaagatccaac G/A gaaatcaaaatatttcatat | 5578 | | |
| ALDH1A2 | 24 | intron 1 + (14173-14176) | tctaaaaaaataaataaata AAAA/Δ gagaaaattaagtttaagat | 5579 | | |
| ALDH1A2 | 25 | intron 1 + 14586 | actcatttattggttcaaag C/G cttcttcaaccttaaaatat | 5580 | | |
| ALDH1A2 | 26 | intron 1 + 14595 | ttggttcaaagccttcttca A/G ccttaggatatgcattgagg | 5581 | | |
| ALDH1A2 | 27 | intron 1 + 14711 | gtttgagacattaacttcta A/G ttcaactaaagatgctagtt | 5582 | | |
| ALDH1A2 | 28 | intron 1 + (15327-15337) | aaagagcacagtagaaagac (T)9-11 aaccctagcaatactattga | 5583 | | |
| ALDH1A2 | 29 | intron 1 + 17258 | atcagtacaatgtgttgggc A/G tacaacacttaatttaaaat | 5584 | | |
| ALDH1A2 | 30 | intron 1 + 18277 | taatacaaatcatttgaagc A/G tttactattaaaaaaacaaa | 5585 | | |
| ALDH1A2 | 31 | intron 1 + 18734 | ctttgagcacctactgcatt T/A taagtgctgttaagatgtgg | 5586 | | |
| ALDH1A2 | 32 | intron 1 + 19081 | ttaatcacctcaatctttaa C/T gaatttcttgatttttcttt | 5587 | | |
| ALDH1A2 | 33 | intron 1 + 21514 | aatcaggatatggggggttc G/A ttctttattctgccacaaat | 5588 | | |
| ALDH1A2 | 34 | intron 1 + 21732 | cattttsaaatagtgcttta A/G taggacttggctgttaaagt | 5589 | | |
| ALDH1A2 | 35 | intron 1 + 21865 | tggcataggtttaaaaatgt C/T tgttgtaggactcttttcca | 5590 | | |
| ALDH1A2 | 36 | intron 1 + 26282 | taaagaaggagaaaaaaaaa A/Δ ctaatctgagactttgcagg | 5591 | | |
| ALDH1A2 | 37 | intron 1 + 27805 | ggatgatgctaoccaaggaa T/C tgcacacttccagacagtac | 5592 | | |
| ALDH1A2 | 38 | intron 1 + 28204 | tcactccattttttaactgt C/G cttcctaaatgtgtggttaa | 5593 | | |
| ALDH1A2 | 39 | intron 1 + 28521 | tctttgttacacttcttaaa T/C cggggtatcagataatcttc | 5594 | | |
| ALDH1A2 | 40 | intron 1 + 49478 | gaataaaaggatagggacat G/T ggtaagaccactttttccct | 5595 | | |
| ALDH1A2 | 41 | intron 1 + 49834 | gcctctcaattttctcatgt G/T taatagagagaaaaccctgc | 5596 | | |
| ALDH1A2 | 42 | intron 1 + 50351 | gactgactggttcataagtt C/G agaaatttcactgtggtcct | 5597 | | |
| ALDH1A2 | 43 | intron 1 + 51181 | tgttattaccatagtagttc C/T gtaacacttggcccttgact | 5598 | | |
| ALDH1A2 | 44 | intron 3 + 654 | ttaacctctcttgagtaaaa G/A gaatccttcagaaccagagg | 5599 | | |
| ALDH1A2 | 45 | intron 3 + 668 | gtaaaaggaatccttcagaa C/T cagaggggatggtacggacc | 5600 | | |
| ALDH1A2 | 46 | intron 3 + 712 | catacacttctgctccgttt G/T ccctgtcattctgtgagcca | 5601 | | |
| ALDH1A2 | 47 | intron 3 + 1273 | tattcatactgtgaaaaagg T/A gtttcatggtgaagaaattc | 5602 | | |
| ALDH1A2 | 48 | intron 3 + 1743 | ccacacctaaatgagattcc C/T gttttaaacactctcaacct | 5603 | | |
| ALDH1A2 | 49 | intron 3 + 2891 | tgcacatatatactcattgt A/G gtttttactaggaactacac | 5604 | | |
| ALDH1A2 | 50 | intron 3 + 2919 | ctaggaactagaccaaactg G/A cagtactagaaatcttttta | 5605 | | |
| ALDH1A2 | 51 | intron 3 + 3054 | tggaaagttctggggactta G/C tatctctccatttctcttcc | 5606 | | |
| ALDH1A2 | 52 | intron 4 + 290 | cattgtgctagattaggtgc T/C ggggtaggtatgaaggggca | 5607 | | |
| ALDH1A2 | 53 | intron 4 + 388 | ctccttgccctcctgaaaca T/C ataagatctactctttggaa | 5608 | | |
| ALDH1A2 | 54 | intron 4 + 461 | gattatggctgattttcagt G/T tctttttaatatttttctct | 5609 | | |
| ALDH1A2 | 55 | intron 4 + 506 | tctatatttctcgaacggcc G/A tgaattactttcataatcta | 5610 | | |
| ALDH1A2 | 56 | intron 4 + 1952 | ttggtccccactccacctgt C/G atttcattattaaaacaaca | 5611 | | |
| ALDH1A2 | 57 | intron 4 + 2079 | ctctatttggcctaacggta C/T cttggttttcttttacttcc | 5612 | | |
| ALDH1A2 | 58 | intron 4 + 2519 | ttgggtcataagagctctct C/G catggtgtctcanacagatg | 5613 | | |
| ALDH1A2 | 59 | intron 4 + (2840-2851) | tttgtctctgcatacttggc (T)11-13 cacagtgaagtctggaatat | 5614 | | |
| ALDH1A2 | 60 | intron 4 + 7231 | aataggatacaaatacacaa A/T gatagtgattcagatcctaa | 5615 | | |
| ALDH1A2 | 61 | intron 4 + 7958 | taaaatcgtttttattgtta C/T taggtatataaaatttgcta | 5616 | | |
| ALDH1A2 | 62 | intron 4 + 8090 | tctgattttatcactgttta C/T agattgcttagtcatactca | 5617 | | |
| ALDH1A2 | 63 | intron 4 + 12823 | tgttagcctgtagctaaatg C/T ttttcaaatatgtgaacggt | 5618 | | |
| ALDH1A2 | 64 | intron 4 + 12939 | atgaggtccgacttttaaga T/C ttttgtctacattttcttcc | 5619 | | |
| ALDH1A2 | 65 | intron 4 + 14935 | tattgatggagttcttttta T/G aaatggacttttaccttctt | 5620 | | |
| ALDH1A2 | 66 | intron 4 + 15321 | gcatttgtgtgtctgagaga C/T atatccagaaatatgctatg | 5621 | | |
| ALDH1A2 | 67 | intron 4 + 15412 | tttcaagtttatttctgttt T/G tttttttttttttttttttg | 5622 | | |
| ALDH1A2 | 68 | intron 5 + 1888 | aatccaaacatctgtacttt G/T tagtggacaagatttatgtc | 5623 | | |
| ALDH1A2 | 69 | intron 7 + 9166 | gaaaagctactttattcaaa G/A ataaaagtattttaagaaaa | 5624 | | |
| ALDH1A2 | 70 | intron 7 + 9914 | aagctggagaaaatactagg C/T tttcctcaacagtgatttcc | 5625 | | |
| ALDH1A2 | 71 | intron 7 + 18942 | tttggaggggaactaatccc G/A tgacttctaggttatctctt | 5626 | | |
| ALDH1A2 | 72 | intron 7 + 19820 | ttcacccctcattttaggtt A/G ggggaggtggcttgctacag | 5627 | | |
| ALDH1A2 | 73 | intron 7 + 19826 | cctcattttaggttagggga G/A gtgtcttgctacagttttag | 5628 | | |
| ALDH1A2 | 74 | intron 7 + 19913 | cgtgaatcattcagtatttt A/G tttaaaaataccagtttgaa | 5629 | | |
| ALDH1A2 | 75 | intron 7 + (20110-20111) | catgatttattctctaacta (ACTA) tgctaagtcaaagattctgc | 5630 | | |
| ALDH1A2 | 75 | intron 7 + (20110-20111) | catgatttattctctaacta tgctaagtcaaagattctgc | 5631 | | |
| ALDH1A2 | 76 | intron 7 + 21857 | acaatgaaaattaagaaagg A/T gaagagggaagaagnagaga | 5632 | | |
| ALDH1A2 | 77 | intron 7 + 21929 | tacaagacacaggcatcttt A/G actagtttactgggatctct | 5633 | | |
| ALDH1A2 | 78 | intron 7 + 23308 | ggctttcacttcggaaacct G/T tgggttataacaaagtactg | 5634 | | |
| ALDH1A2 | 79 | intron 7 + 23554 | gacattggtgaaaaccaggg C/T tgtttaggagtgtcctgtcc | 5635 | | |
| ALDH1A2 | 80 | intron 7 + (23701-23703) | catctgagatttgccttgtg GTG/Δ tttaccgagttagtgggtgc | 5636 | | |
| ALDH1A2 | 81 | intron 7 + 26479 | gatacatgaacaatttgttt T/C atcctcatgatatctttcaa | 5637 | | |
| ALDH1A2 | 82 | intron 7 + 26561 | taaaggccacaatgcagtga T/C tgaaatctccagttacattt | 5638 | | |
| ALDH1A2 | 83 | intron 7 + 26662 | tttccttagtccttccatca C/T gaaactaaagctgtcttcca | 5639 | | |
| ALDH1A2 | 84 | intron 8 + 76 | tttatatctccacttttgat G/A ggacactagcaaaagatatt | 5640 | | |
| ALDH1A2 | 85 | intron 8 + (700-711) | accatctcattcagtgattc (T)11-12 ccctccacttgttgccaggc | 5641 | | |
| ALDH1A2 | 86 | intron 8 + 724 | ttttttttccctccacttgt T/C gccaggcagagctgctttcc | 5642 | | |
| ALDH1A2 | 87 | intron 8 + 800 | cagattgcttgaatttcagc C/A ccagcttggaatttgcagag | 5643 | | |
| ALDH1A2 | 88 | intron 8 + 1251 | gatttctgtgaaaattgaga G/A gatctggcaacctggggctc | 5644 | | |
| ALDH1A2 | 89 | intron 8 + 1627 | ggcccctccccaggcaaagc G/A gtgagaacatggctgtttcc | 5645 | | |
| ALDH1A2 | 90 | exon 9 + 141 | tggagcgggccaagaggcgc G/A tagtggggagtccctttgac | 5646 | | |
| ALDH1A2 | 91 | intron 9 + 778 | aaccagtctggacagatccc T/C tgtagcttgtgaaagtgtag | 5647 | | |
| ALDH1A2 | 92 | intron 9 + 801 | tagcttgtgaaagtgtagga A/G gtgaagggctggctcacttc | 5648 | | |
| ALDH1A2 | 93 | intron 9 + 868 | tctgaaggcctcgtgtactt T/C agtggggtggggagggccac | 5649 | | |
| ALDH1A2 | 94 | intron 9 + 1338 | aatttttgcctctttttact A/G tcaatacaacttgctaagtt | 5650 | | |
| ALDH1A2 | 95 | intron 10 + (227-229) | ctatgtgcttatgattatta TTA/Δ gccaacagaacaatcagaat | 5651 | | |
| ALDH1A2 | 96 | intron 10 + 316 | ctaaatgtcggtcactggga T/C gttaaccaggatagagaatc | 5652 | | |
| ALDH1A2 | 97 | intron 10 + 368 | ctttacatctctgcaagaga G/A ggacaaggagcaaatcagcc | 5653 | | |
| ALDH1A2 | 98 | intron 10 + 660 | gtaaacttgcattgaaatgt G/A gaaagcaggtaaaggaatca | 5654 | | |
| ALDH1A2 | 99 | intron 11 + 104 | tggggaataccaaaagcaac C/T aaagttcaccagaaaagggg | 5655 | | |
| ALDH1A2 | 100 | intron 11 + 229 | aaacttctaaaagaaatacc A/G tgccagtcagatiatgtgct | 5656 | | |
| ALDH1A2 | 101 | intron 12 + 117 | catacattcaacaaacattt C/T gtggagcacatgctactata | 5657 | | |
| ALDH1A2 | 102 | intron 12 + 691 | gatagggaagatcactgtga A/G ctggaaaaatctcggaaacc | 5658 | | |
| ALDH1A2 | 103 | intron 12 + 1934 | catcttgtctagattgcatg T/C ttgtttgtttgtttgtctct | 5659 | | |
| ALDH1A2 | 104 | intron 12 + 1973 | ctacttacccccaaaacatg T/A tttctctttcttaaatgacc | 5660 | | |
| ALDH1A2 | 105 | intron 12 + 2722 | ccagagtgactccagtatac C/A tcactgcccaggacccacag | 5661 | | |
| ALDH1A2 | 106 | intron 12 + 3855 | cacttgaaagcaaccataat T/C gtgaggtttctgatgctgtg | 5662 | | |
| ALDH1A2 | 107 | intron 12 + 4185 | ttgctttaagcgaaatgaac T/C atacggacaggagaacaggc | 5663 | | |
| ALDH1A2 | 108 | intron 12 + 4991 | acaggaacacttagacatgc A/G acccactcccaccctccgtc | 5664 | | |
| ALDH1A2 | 109 | intron 12 + (5018-5019) | cccaccctccgtcttggggg (G) aggaaagcacactactgtcc | 5665 | | |
| ALDH1A2 | 109 | intron 12 + (5018-5019) | cccaccctccgtcttggggg aggaaagcacactactgtcc | 5666 | | |
| ALDH1A2 | 110 | intron 12 + (5051-5052) | actgtcccaaagaactaata (A) ctgaaccagtgctgccttgt | 5667 | | |
| ALDH1A2 | 110 | intron 12 + (5051-5052) | actgtcccaaagaactaata ctgaaccagtgctgccttgt | 5668 | | |
| ALDH1A2 | 111 | intron 12 + (5300-5302) | ttaaagttttaaaaaaactt CCT/Δ taaaaactactcatgagatg | 5669 | | |
| ALDH1A2 | 112 | intron 12 + 5405 | catcccaggacttgctgttc G/C caggtgataaactgcacctc | 5670 | | |
| ALDH1A2 | 113 | intron 12 + 5435 | aactgcacctccccaggact C/A ccgctgcactcacatgcagc | 5671 | | |
| ALDH1A2 | 114 | 3′flanking + 449 | tttgggccgggaacaatttt T/C caaggttgtaaagccaaatt | 5672 | | |
| ALDH1A2 | 115 | 3′flanking + 597 | acctgggatattcctgaccc A/C atctggttttcttttaccca | 5673 | | |
| ALDH1A2 | 116 | 3′flanking + 669 | atagagactggaagtcatca T/C gtgcagttcaccgcttctga | 5674 | | |
| ALDH1A2 | 117 | 3′flanking + 1122 | cgtgctccactgagctcctc T/G gtcacaccccattcttgccc | 5675 | | |
| ALDH1A2 | 118 | 3′flanking + 2214 | tgcagctgtaaaaagaaatc T/C gtaaatggtgaccgtactac | 5676 | | |
| ALDH1A3 | 1 | 5′flanking − 1425 | cagtgttagccagccgatat C/T ggtcaaggctgccccgctcg | 5677 | | |
| ALDH1A3 | 2 | 5′flanking − 1379 | ccattatcccctttccccgg C/T ctcagctgtgcactccaggc | 5678 | | |
| ALDH1A3 | 3 | 5′flanking − 1270 | aacttacccctctatccagc T/A ctatccagaaggacaccagg | 5679 | | |
| ALDH1A3 | 4 | 5′flanking − (1214-1213) | acggaggcctcaaaacagga (GGA) aaataagcagacccctcccc | 5680 | | |
| ALDH1A3 | 4 | 5′flanking − (1214-1213) | acggacgcctcaaaacagga aaataaggagacccctcccc | 5681 | | |
| ALDH1A3 | 5 | 5′flacking − 1103 | gcacagcttttgtcaggagt C/T cgtgcctccggtctttgttc | 5682 | | |
| ALDH1A3 | 6 | intron 1 + 986 | gccttaactttccccacctt T/G ggcttctcttgatttttgct | 5683 | | |
| ALDH1A3 | 7 | intron 1 + 1462 | gtacaggatttcaaaatact G/A tatatagaaaccagacagta | 5684 | | |
| ALDH1A3 | 8 | intron 1 + 1661 | cctgttgtcttggtcggtgc G/A cascctttgccagttaaagg | 5685 | | |
| ALDH1A3 | 9 | intron 1 + 2360 | agaggatagaagtcccttct A/G atttagagggcctctttctt | 5686 | | |
| ALDH1A3 | 10 | intron 1 + 2516 | tgaaaacatattctttttga G/A tttagctgagtggcctgttg | 5687 | | |
| ALDH1A3 | 11 | intron 1 + 2624 | cctgagacaccttacagctc C/T gtcctgcttccatgtcattc | 5688 | | |
| ALDH1A3 | 12 | intron 1 + 3255 | tttcatctttctacaaatgg G/C cccctcttcctggctgcact | 5689 | | |
| ALDH1A3 | 13 | intron 1 + (3643-3656) | gcttcagaggtttttgtggg (T)12-14 aacattctatcaacttttaa | 5690 | | |
| ALDH1A3 | 14 | intron 1 + 4265 | ccaaaagccctctcttttaa T/C atgacattaataagacaatt | 5691 | | |
| ALDH1A3 | 15 | intron 1 + 5187 | caagatggataagacgtcac C/T taaggtccttagcatgttga | 5692 | | |
| ALDH1A3 | 16 | intron 2 + 43 | ctctaagtaattcaattatg G/T atgaccaaaggataacgaaa | 5693 | | |
| ALDH1A3 | 17 | intron 2 + 127 | cagggcctgggctagctgcg T/C gaattggcatgtggttctca | 5694 | | |
| ALDH1A3 | 18 | intron 2 + (285-300) | aggaaaggttttcttttttc (T)16-17 atcaattatttggacctgga | 5695 | | |
| ALDH1A3 | 19 | intron 2 + 770 | cgtgtgcagagtaggcttgg A/G ttttatcttgcccatgagtt | 5696 | | |
| ALDH1A3 | 20 | intron 2 + 1216 | actcggtagagtcactcctg A/C ctggtgtcccacatccactc | 5697 | | |
| ALDH1A3 | 21 | intron 3 + 81 | accatggggtatgggaaaaa A/C gatcacggtcctggttttct | 5698 | | |
| ALDH1A3 | 22 | intron 3 + 236 | gctcagcttcttgaccaact T/G gttgtctataggcagttgag | 5699 | | |
| ALDH1A3 | 23 | intron 3 + 1467 | ggcccggttgtaggggagga G/T atctcctttctggcctttgc | 5700 | | |
| ALDH1A3 | 24 | intron 3 + 1725 | ccacatgttccccgggtgag A/G gtagctccctcccaggctaa | 5701 | | |
| ALDH1A3 | 25 | intron 3 + 3777 | gccagaagtagatcccccca A/G ttcagctgctgcattactcg | 5702 | | |
| ALDH1A3 | 26 | intron 3 + 3829 | caagtcactgggcccttagc G/C tccgtgcctgcaccttgaag | 5703 | | |
| ALDH1A3 | 27 | intron 3 + 4299 | tcactttccacagccacact G/A gccagcctccccgagaagga | 5704 | | |
| ALDH1A3 | 28 | intron 4 + 84 | agagccccccctgactgttt C/G cctaaggcaccattcccaac | 5705 | | |
| ALDH1A3 | 29 | intron 4 + 126 | ccactccctctccaaatggt A/G ctgccaattcttcttctaag | 5706 | | |
| ALDH1A3 | 30 | intron 6 + (290-291) | tagagaattttcaggggggg (G) tcaaccaagagggagccaaa | 5707 | | |
| ALDH1A3 | 30 | intron 6 + (290-291) | tagagaattttcacgccggg tcaaccaagagggagccaaa | 5708 | | |
| ALDH1A3 | 31 | intron 6 + 705 | aacagctggtgatgagccaa T/G tttccactttcctttgctga | 5709 | | |
| ALDH1A3 | 32 | intron 7 + 56 | ggggcgtgttatttcacacc C/T gtcagcttttcctttgacag | 5710 | | |
| ALDH1A3 | 33 | intron 7 + 1107 | gatgctgttactctccttcc A/G gacagacactgccctgtgga | 5711 | | |
| ALDH1A3 | 34 | intron 7 + 1610 | aagagccacacagaaccacc C/G ccctactgggctgttggaat | 5712 | | |
| ALDH1A3 | 35 | intron 7 + 1820 | cacctgtaagtggagcggct T/C agaccaaggatcccaggatc | 5713 | | |
| ALDH1A3 | 36 | intron 8 + 963 | gagaaaggacaggaggagga C/T acaggctctcaggaaggaaa | 5714 | | |
| ALDH1A3 | 37 | intron 8 + 1824 | accattcttatccactaagc G/A tgtcccccaagatcttattc | 5715 | | |
| ALDH1A3 | 38 | intron 8 + 2384 | cgcctccctcgccccctccc C/A tccagtggacttggcagtgg | 5716 | | |
| ALDH1A3 | 39 | intron 9 + 24 | atccccctggtgtgtgtgaa A/C ccatggtgcttgtctagggg | 5717 | | |
| ALDH1A3 | 40 | intron 9 + 91 | gcctacagggtccctctccg T/C gaaaggaatgctgacctgtc | 5718 | | |
| ALDH1A3 | 41 | intron 9 + 219 | actgaggcatgggaggaggg C/G gctattcccagggcagaagg | 5719 | | |
| ALDH1A3 | 42 | intron 9 + 435 | ccagacggagagagcctggg G/A caggagaatgtatctccacc | 5720 | | |
| ALDH1A3 | 43 | intron 9 + 1472 | ttcacttttgaggccagata C/T accgatttcttccaagagaa | 5721 | | |
| ALDH1A3 | 44 | intron 9 + 2038 | taaacaatgtgttcctacgg G/A ctctccagggagtgtggact | 5722 | | |
| ALDH1A3 | 45 | intron 9 + 2124 | caaacagggtctgccagatg G/A catatgcccagcagccaggg | 5723 | | |
| ALDH1A3 | 46 | intron 9 + 2154 | agcagccagggaggacgtgc G/C gttgggcgaagcccctgtgt | 5724 | | |
| ALDH1A3 | 47 | intron 9 + 2197 | cttttggcccctcagggagg G/A gaagagcagctcagcagcat | 5725 | | |
| ALDH1A3 | 48 | intron 9 + 2466 | ttcttagttcctcatgtttc C/T ctctagaatgttttcgtgtg | 5726 | | |
| ALDH1A3 | 49 | intron 9 + 3655 | gattggtcaagtggcatgca C/T ggtttatgccctctctcctg | 5727 | | |
| ALDH1A3 | 50 | intron 9 + 3954 | gggtgcgcttttgacaactg C/G tcagtagcgtgttcacaagc | 5728 | | |
| ALDH1A3 | 51 | exon 10 + 88 | tggaatgcgggggctcagcc A/C tggaagacaagsggctcttc | 5729 | | |
| ALDH1A3 | 52 | intron 18 + 8 | tgccaaagaggaggtacaag G/A gggctgtggcaaggctacga | 5730 | | |
| ALDH1A3 | 53 | intron 10 + 307 | ctctctgattttctaacaca A/C ccggtccccgagtcagtcat | 5731 | | |
| ALDH1A3 | 54 | intron 10 + 378 | gtgggttttgccaggaatca G/A ttcaagaacctgtggattca | 5732 | | |
| ALDH1A3 | 55 | intron 10 + 975 | aatattgtgtcattccttcc C/G ctggtagttattatggaaac | 5733 | | |
| ALDH1A3 | 56 | intron 10 + 1088 | cagtgccaggagccaggggg C/T cttctccagatgaccttgag | 5734 | | |
| ALDH1A3 | 57 | intron 11 + 105 | ttgtctacattgtatattat A/G taccaagccctgtctcagtg | 5735 | | |
| ALDH1A3 | 55 | intron 11 + 274 | agggctccagtacctgtgcc T/G gtggcccctgtgctgtactg | 5736 | | |
| ALDH1A3 | 59 | intron 11 + 1088 | cagtgccaggagccaggggg T/A cttctccagatgaccttgag | 5737 | | |
| ALDH1A3 | 60 | intron 12 + 96 | ctccaatgtgctgagacccc G/A tcccccccacaccgccgctc | 5738 | | |
| ALDH1A3 | 61 | intron 12 + 1537 | gggccttggttggggccttt G/T tgtggctctcttttgagatt | 5739 | | |
| ALDH1A3 | 62 | intron 12 + 1660 | gtccccctcccacctcagtc C/Δ10 tgctttgtagtccatccgtg | 5740 | | |
| ALDH1A3 | 63 | intron 12 + 5642 | tctgtgctaacgtctgcttc T/C ctcatgccccctaggctggc | 5741 | | |
| ALDH1A3 | 64 | exon 13 + 104 | gggctccttcctcaaacatc G/C gacggcggaatgtggcagat | 5742 | | |
| ALDH1A3 | 65 | exon 13 + 281 | ataggttgtctgtgaaatcg C/T agtcctgcctggggagggag | 5743 | | |
| ALDH1A3 | 66 | 3′flanking + 743 | gtgagcaggaaactgtagga G/A aaggatattttccctcattt | 5744 | | |
| ALDH1A3 | 67 | 3′flanking + 1145 | gcctcccagctaccccaccc A/G cctcaggaggggtcattcca | 5745 | | |
| ALDH1A3 | 68 | 3′flanking + 1185 | aacctagggtgctgagaatc T/C gggtgggattaccagcaaaa | 5746 | | |
| ALDH1A3 | 69 | 3′flanking + 1600 | acaccacgccctgcaaattg T/C tgggaacttgtcggtggcaa | 5747 | | |
| ALDH1A3 | 70 | 3′flanking + 1847 | caggagccctgcggctgcgg C/G ggttctgtgaaatggcagtg | 5748 | | |
| ALDH1B1 | 1 | intron 1 + 134 | cgttgcactgtaggactcct C/T ccacgtcccctaatcccatc | 5749 | | |
| ALDH1B1 | 2 | intron 1 + 367 | gcagttcccgcggatagaga A/G ggtccggtccttcgggctgt | 5750 | | |
| ALDH1B1 | 3 | intron 1 + 405 | tgtgggtgaactgtaaaaaa C/T tgcctgtattcaggaggata | 5751 | | |
| ALDH1B1 | 4 | intron 1 + 2002 | cttcaactaatctgggaaca C/T tacactctgtttaattttca | 5752 | | |
| ALDH1B1 | 5 | intron 1 + 2157 | tgggaaagctgaeaagggat G/T ctgagacctgtggttggggg | 5753 | | |
| ALDH1B1 | 6 | exon 2 + 192 | ccgacggtcaaccctaccac T/C ggggaggtcattgggcacgt | 5754 | | |
| ALDH1B1 | 7 | exon 2 + 265 | cgtgaaagcagcgggggaag C/T cttccgcctggggtccccat | 5755 | | |
| ALDH1B1 | 8 | exon 2 + 329 | gcggggccggctgctgaacc G/T cctggcagacctagtggagc | 5756 | | |
| ALDH1B1 | 9 | exon 2 + 614 | acttgccccggcactcgcca C/T aggcaacactgtggttatga | 5757 | | |
| ALDH1B1 | 10 | 3′flanking + 168 | aaagtgcaactgtaagaccc G/A tagagaaaaactctggttcc | 5758 | | |
| ALDH1L1 | 1 | intron 1 + 252 | cgcagcgccaggagtggccc G/C ccgaggatctggccggccgc | 5759 | | |
| ALDH1L1 | 2 | intron 1 + 544 | ctcaggggctgcgctggagt C/T ccagctccagccactgcgct | 5760 | | |
| ALDH1L1 | 3 | intron 1 − 6596 | cagatttttcttaaggtgca C/G tagccactgaggatattttt | 5761 | | |
| ALDH1L1 | 4 | intron 1 − 6513 | caattatggtttatcttagg G/A acatgtttatagagatagta | 5762 | | |
| ALDH1L1 | 5 | intron 1 − 6478 | atagtattcttacttagctt G/A cattctaaattttgttccct | 5763 | | |
| ALDH1L1 | 6 | intron 3 + 240 | gtggcattagggtcctggag A/G agggctatagagaagcccag | 5764 | | |
| ALDH1L1 | 7 | intron 2 + 1326 | gaggaggagaccggagagga G/C agccagtccagtcagggccc | 5765 | | |
| ALDH1L1 | 8 | intron 3 + 386 | gtcctactctaacttccact G/A ccgctgctctgggcagcaca | 5766 | | |
| ALDH1L1 | 9 | intron 4 + 271 | gggcccgttcaatagacaag G/C aaggctaaaggcagggagtg | 5767 | | |
| ALDH1L1 | 10 | intron 4 + 356 | taggattctatttctctctc C/T ttcactcgttgattctcctt | 5768 | | |
| ALDH1L1 | 11 | intron 4 + 608 | gtgctctgataggctgtctc A/C gtcacatgcttcctgctggg | 5769 | | |
| ALDH1L1 | 12 | intron 4 + 664 | ggtcacatggcctgagcggc A/G gggcggctcagtcacctccc | 5770 | | |
| ALDH1L1 | 13 | intron 4 + 785 | gaggctggcttgcccctgcc C/G gaggacaggctggcagggac | 5771 | | |
| ALDH1L1 | 14 | intron 4 + 874 | ccctggggagcccttgctgt T/G tgggcgcagcaggaagagca | 5772 | | |
| ALDH1L1 | 15 | intron 4 + 1349 | tccctcaggctcttgctcac G/A tgggcccagacctcttggct | 5773 | | |
| ALDH1L1 | 16 | intron 4 + 1799 | gtggggctgggaaggaggca G/A ggtcctattgctggggatag | 5774 | | |
| ALDH1L1 | 17 | intron 4 + 1815 | ggcagggtcctattgctggg G/A atagcaacccactggatctc | 5775 | | |
| ALDH1L1 | 18 | intron 5 + 272 | aaagcccacagggagataag A/G gtgggagttagggggcaaaa | 5776 | | |
| ALDH1L1 | 19 | intron 5 + 301 | tagggggcaaaacgtccgcc G/A tagtgcgagcagtcttcaag | 5777 | | |
| ALDH1L1 | 20 | intron 5 + 343 | caaggtstgagggacagtgc G/A ggtctctggagcaatagcca | 5778 | | |
| ALDH1L1 | 21 | intron 6 + 926 | cctgcctgggctagtggctt C/T gggggcttcttctcacccac | 5779 | | |
| ALDH1L1 | 22 | exon 7 + 41 | aacgctgaacacttcaggcc T/C ggtgcccgagsgagacgctt | 5780 | | |
| ALDH1L1 | 23 | intron 7 + 305 | cctagaatcagagagaagcc C/T tcccagggagcctgggttca | 5781 | | |
| ALDH1L1 | 24 | intron 7 + 837 | gtcnggacaaaccccatggg C/T gtggtacccccagccgtgtt | 5782 | | |
| ALDH1L1 | 25 | intron 7 + 866 | cccagccgtgttgctgtgtc C/T gccctaccagagtgaggcgt | 5783 | | |
| ALDH1L1 | 26 | intron 7 + 884 | tccggcctaccagagtgagg C/T gtggcagtatggggcctggc | 5784 | | |
| ALDH1L1 | 27 | intron 7 + 1118 | aatgttccagaaaatcatgc G/C agccagtaagggcagaggaa | 5785 | | |
| ALDH1L1 | 28 | intron 7 + 1168 | aaagtaaaggttcaggagaa G/A tctagcctggggctgctccc | 5786 | | |
| ALDH1L1 | 29 | intron 7 + 1451 | cagggcacccacagcatgtg T/C ccagagacctgcaaagacag | 5787 | | |
| ALDH1L1 | 30 | intron 7 + 1489 | caggaatgcaaagaaggcaa T/C taagtgtcttaagaggaagc | 5788 | | |
| ALDH1L1 | 31 | intron 7 + 1579 | tcagggtgggaggggagtga G/A gagagaccagctgagcacac | 5789 | | |
| ALDH1L1 | 32 | intron 7 + 1691 | ctggctgggctttagcttgc A/C gaaagctccagaacatcttt | 5790 | | |
| ALDH1L1 | 33 | intron 8 + 1632 | tcaggtttgcatttgttcac T/C gtgcacattcagagttccac | 5791 | | |
| ALDH1L1 | 34 | intron 8 + 1799 | gctcaagtcctcctctagct G/C ttcaccgtgcagccccctaa | 5792 | | |
| ALDH1L1 | 35 | intron 8 + 1986 | ggtggaggggcctggcctgt G/T gctgttcaggagaacgctcc | 5793 | | |
| ALDH1L1 | 36 | intron 8 + 2002 | ctgtggctgttcaggagaac A/G ctccaagagcctgctgtggg | 5794 | | |
| ALDH1L1 | 37 | intron 8 + 2627 | aaagaggagagcggggggtg C/T ttgtgccaggggttggggga | 5795 | | |
| ALDH1L1 | 38 | intron 8 + 2646 | gcttgtgccaggggttgggg G/A aactggttctgattgggcct | 5796 | | |
| ALDH1L1 | 39 | intron 8 + 2925 | ctgctgccctccataggtcc C/G agactgaatccttcagagga | 5797 | | |
| ALDH1L1 | 40 | exon 9 + 4 | caggtcttgctttgcagagt G/T tttggcagcggatcctcccc | 5798 | | |
| ALDH1L1 | 41 | exon 10 + 109 | cagctgttagtgaggaagct G/T cgaggggacgataaggaggg | 5799 | | |
| ALDH1L1 | 42 | intron 10 + (671-672) | tggcattttcctctgtgtga (AG) gtcctcttagcccaccctaa | 5800 | | |
| ALDH1L1 | 42 | intron 10 + (671-672) | tggcattttcctctgtctga gtcctcttagcccaccctaa | 5801 | | |
| ALDH1L1 | 43 | intron 11 + 8 | caccgatggaagtgtgagtg C/A aggcccagcaccccttctcc | 5802 | | |
| ALDH1L1 | 44 | intron 11 + 447 | atgagccaaagcacgcctat G/A gtagatacacacgtgaacat | 5803 | | |
| ALDH1L1 | 45 | intron 11 + 601 | ctcaaaatgagtcatttgag A/G ggagttaatgaaagactcat | 5804 | | |
| ALDH1L1 | 46 | intron 11 + 639 | catctgcaaagggagaggga G/A ggggtagggacacagacagg | 5805 | | |
| ALDH1L1 | 47 | intron 12 + 66 | ctgggcagtggcacggggag G/Δ acttctgtggaggccctttt | 5806 | | |
| ALDH1L1 | 48 | intron 12 + 478 | ctattaaaaaaaaaaaaaaa A/Δ tttaagccagggagaaaggg | 5807 | | |
| ALDH1L1 | 49 | intron 12 + 684 | tcctgggagaagagagggtg C/T ggccagatgagccgagaaca | 5808 | | |
| ALDH1L1 | 50 | intron 12 + 767 | cgtctaggggtaggaagaca A/G gttatggcgtggtcccaacg | 5809 | | |
| ALDH1L1 | 51 | intron 12 + 1014 | tcataggttccagtcccctt C/T gaaagccccctaattctaga | 5810 | | |
| ALDH1L1 | 52 | intron 12 + 1359 | ctggttctgcctcagctcag C/T acagcagaggataggtctag | 5811 | | |
| ALDH1L1 | 53 | intron 12 + 1734 | ggtggtccaggctgctggtg G/T taagtagggcgggcggagcc | 5812 | | |
| ALDH1L1 | 54 | intron 12 + 1901 | ttcagcagcctaagtgaatt G/A acaatagaatagtcctgcaa | 5813 | | |
| ALDH1L1 | 55 | intron 12 − 470 | gggatggggccacatctcca T/C ctctggagatgccaggctca | 5814 | | |
| ALDH1L1 | 56 | intron 12 − 334 | aagggcagcctcttgggcca T/C gacccctttgctgtctgcag | 5815 | | |
| ALDH1L1 | 57 | intron 12 − 325 | atcttgggccatgacaaatt T/C gctgtctgcagcaagtgggt | 5816 | | |
| ALDH1L1 | 58 | intron 12 − 221 | gaaggaagcgagggaagatc G/C aggaaaggagagagggacag | 5817 | | |
| ALDH1L1 | 59 | intron 12 − 4 | cccgcttcccctcaccctgg T/C gcaattggcagatctcatcg | 5818 | | |
| ALDH1L1 | 60 | intron 13 + 34 | tcccaggcagtgtgagcaca T/C gcagactggaccagccatat | 5819 | | |
| ALDH1L1 | 61 | intron 13 + 58 | gaatggcccagccatatagg A/G gaactaaaagggcagcacag | 5820 | | |
| ALDH1L1 | 62 | intron 13 + 125 | ccaaaactggtggcttggaa T/C gaaaaatgtttattagcttg | 5821 | | |
| ALDH1L1 | 63 | intron 13 + 126 | cacaaatggtggattggaat G/A aaacctgtttattagattgt | 5822 | | |
| ALDH1L1 | 64 | intron 13 + 281 | acctgcatccagacgagtta T/G ggtgttgacagagttcagtt | 5823 | | |
| ALDH1L1 | 65 | intron 13 + 299 | tcgggtgttgacagagttca A/G ttccgtgtggatgcagggct | 5824 | | |
| ALDH1L1 | 66 | intron 14 + 121 | catttatcaaacagccatac A/G tgtgcttcttgagcacctgc | 5825 | | |
| ALDH1L1 | 67 | intron 14 + 167 | gccaggcattgttgtaagga C/T ttgaggacaattgtatttaa | 5826 | | |
| ALDH1L1 | 68 | intron 14 + 205 | taatctcccagtaacactgg A/C tcagtaaggtccacggtggg | 5827 | | |
| ALDH1L1 | 69 | intron 14 + 219 | cactggatcagtcaggtcca C/G ggtgggaaacaagagtaaac | 5828 | | |
| ALDH1L1 | 70 | intron 14 + 2275 | tctcatctgtgatgcataag T/C cagaaatctgctcccagcat | 5829 | | |
| ALDH1L1 | 71 | intron 14 + 2431 | agaatgactgagtgatgaga C/G ctagagagccccagcccagg | 5830 | | |
| ALDH1L1 | 72 | intron 14 + 2660 | agccaagcatttcttgggga C/T accaagaaaccttgcttggt | 5831 | | |
| ALDH1L1 | 73 | intron 14 + 2740 | aactccaccctcaccgtccg T/C gcagctccccaggagcgtca | 5832 | | |
| ALDH1L1 | 74 | intron 14 + 2756 | tcaatgaagatccccaggag T/C gtcagagggaagaggagggg | 5833 | | |
| ALDH1L1 | 75 | intron 14 + 2805 | ccgaacagcaggagaatgga T/C ccaagggagggagggaaggg | 5834 | | |
| ALDH1L1 | 76 | intron 14 + (3636-3637) | tctcctgggtgtgtgtgggg (G) tgtggggcagctcccctatc | 5835 | | |
| ALDH1L1 | 76 | intron 14 + (3636-3637) | tctcctgggtgtgtgtgggg tgtggggcagctcccctctc | 5836 | | |
| ALDH1L1 | 77 | intron 14 + 4347 | tacaggacagaaacagcagg C/T gtgagctgactctaagaggg | 5837 | | |
| ALDH1L1 | 78 | intron 15 + 380 | atgtcccttatgtcgcttca A/G agaacagaagtactggagag | 5838 | | |
| ALDH1L1 | 79 | intron 15 + (1055-1056) | gccacaatctgcagctactc (C) tcccagcttgctgctgggct | 5839 | | |
| ALDH1L1 | 79 | intron 15 + (1055-1056) | gccacagtctgaagctacta tcccagcttgctgctgggct | 5840 | | |
| ALDH1L1 | 80 | intron 17 + 15 | gaaaaggtgagtggctgggg G/C tggagcagaggaggggctgc | 5841 | | |
| ALDH1L1 | 81 | intron 17 + 44 | aggaggggctgctgtgagtg C/T gcctgggacatggcagtgat | 5842 | | |
| ALDH1L1 | 82 | intron 17 + 51 | gctgctgtgagtgcgcctgg G/A acatggcagtgctgtccaca | 5843 | | |
| ALDH1L1 | 83 | intron 17 − (2224-2223) | atggtgtaatctcccagaat CT/Δ gtaaataaaaaaaaatatga | 5844 | | |
| ALDH1L1 | 84 | intron 19 + 140 | agcgtcatcacaagcatagc G/A tggcaggcagcaggcttagg | 5845 | | |
| ALDH1L1 | 85 | intron 19 + (51-52) | tggttcactgggacagcagc GC/Δ ctggctggagggggttggag | 5846 | | |
| ALDH1L1 | 86 | intron 19 + 399 | tcaggtcagcctgggcctga C/A catggacaggggccctggag | 5847 | | |
| ALDH1L1 | 87 | intron 19 + 608 | caaccagatttatccaatca A/G ccacacctggaagagcaggc | 5848 | | |
| ALDH1L1 | 88 | intron 19 + (669-670) | atgggccatcctgagtccgc (C) ttgggaggtttgtaatccct | 5849 | | |
| ALDH1L1 | 88 | intron 19 + (669-670) | atgggccataatgagtccac ttgggaggtttgtaatgcct | 5850 | | |
| ALDH1L1 | 89 | intron 19 + 1794 | gtcctgtctgggggtcttaa G/C ggagtaatgagaattccaca | 5851 | | |
| ALDH1L1 | 90 | intron 19 + 1969 | tgatcggggtgcggtttggg G/T cgacaggacaggagaagaga | 5852 | | |
| ALDH1L1 | 91 | intron 19 + 1972 | tcggggtgcggtttggggcg A/G caggacaggagaagagaata | 5853 | | |
| ALDH1L1 | 92 | intron 19 + 2083 | tgagaagagcagaggggtgt G/T ccgggtgctcgagtcacacc | 5854 | | |
| ALDH1L1 | 93 | intron 19 + 2119 | acacctgtgtctgattaggg C/T tgattaggggtgcagagttt | 5855 | | |
| ALDH1L1 | 94 | intron 20 + 1388 | ttaccctcttcccacctccg C/T tggactgtgagttccatgag | 5856 | | |
| ALDH1L1 | 95 | intron 20 + 1564 | cccaggaaccaggaacagtg G/A ggagccatgacccggccctg | 5857 | | |
| ALDH1L1 | 96 | intron 20 + 1873 | taagtgttaaaacatcattt G/A tgtatgtatgaaaaatattg | 5858 | | |
| ALDH1L1 | 97 | intron 20 + 2427 | aataggattggatggacttg G/C gatcaggtctcagctctgtc | 5859 | | |
| ALDH1L1 | 98 | intron 20 + 2458 | cagctctgtcacctgccaac C/T ggcggccccatttccatcaa | 5860 | | |
| ALDH1L1 | 99 | intron 20 + 2544 | ccaggtgggagagaaatatg C/T agcgtggtgacacccatcac | 5861 | | |
| ALDH1L1 | 100 | intron 20 + 2573 | gacacccatcacacgggtgc C/T gtgacccggtgcttatgtcg | 5862 | | |
| ALDH1L1 | 101 | intron 20 + 2574 | acacccatcacacgggtgcc G/A tgacccggtgcttatgtcgg | 5863 | | |
| ALDH1L1 | 102 | intron 21 + 33 | agccacctgttttcacagac G/A tggaagaccacatgttcata | 5864 | | |
| ALDH1L1 | 103 | exon 21 + 87 | ccttcgggcctgtcatgatc A/G tctctcggtttgctcatggg | 5865 | | |
| ALDH1L1 | 104 | intron 21 + 323 | ccatgcattaaaccaccccc C/G acactgagtcgcttggaata | 5866 | | |
| ALDH1L1 | 105 | intron 21 + 361 | ataatcagagatttatttta C/G tcacggtctaggttcaatga | 5867 | | |
| ALDH1L1 | 106 | intron 21 + 478 | gtcttccgcgaggcttcctc C/A gcctggcagcctcccggttg | 5868 | | |
| ALDH1L1 | 107 | intron 23 + 1086 | caacccaatcttccccccgg C/T gctgcagccccgcacatttt | 5869 | | |
| ALDH1L1 | 108 | intron 22 + 235 | gggcctgcacgacacactcc A/C gccaggaggcactgggggcc | 5870 | | |
| ALDH1L1 | 109 | intron 22 + 313 | atagaagggagcacttgccc G/A tgaagacccaggggcccgtg | 5871 | | |
| ALDH1L1 | 110 | intron 22 + 1214 | tgggcccacttatgaatcct G/C cccgagttccctcagctccc | 5872 | | |
| ALDH1L1 | 111 | intron 22 + 1226 | tgaatcctcccggacttccc T/C cagctccctcctaaccctag | 5873 | | |
| ALDH1L1 | 112 | intron 22 + 1623 | ggggcttcccactgtccaga C/G aaggcggtgggagctgggga | 5874 | | |
| ALDH1L1 | 113 | intron 22 + 1688 | attctggggagtcctggccc A/G ctatccactgccagggataa | 5875 | | |
| ALDH1L1 | 114 | 3′flanking + 145 | gagagacaggacgaaatggg C/T gtgggtcatctcggccccca | 5876 | | |
| ALDH1L1 | 115 | 3′flanking + 239 | tgggaaacaggtgggaagac G/A gggattgagctgggtgagcc | 5877 | | |
| ALDH1L1 | 116 | 3′flanking + 288 | ggaagcagctcagactccct C/T agcagatggccccggcccct | 5878 | | |
| ALDH1L1 | 117 | 3′flanking + 1513 | agggtcgcctcagaccccgg A/C gtgctcctgccatgtccagc | 5879 | | |
| ALDH1L1 | 118 | 3′flanking + 1707 | cggtgccccttgccctagca C/T gtgccacttatatcagaaca | 5880 | | |
| ALDH1L1 | 119 | 3′flanking + 1709 | gtgggacttgccctagcacg C/T gccacttataccagaacaga | 5881 | | |
| ALDH1L1 | 120 | 3′flanking + 1745 | acagatgagtccatgtcaac C/T gcttcctgagttccctttgt | 5882 | | |
| ALDH1L1 | 121 | 3′flanking + 1843 | ctgcctctcagcccacaccc G/A ggccgctcacactcctccca | 5883 | | |
| ALDH2 | 1 | intron 3 + 1766 | aaattggtggctcatcctgc C/Δ tggcccccggtccccgcggc | 5884 | | |
| ALDH2 | 2 | intron 8 + 52 | gaaggtagccctccccacct G/C tgttgtcgctccagccgatc | 5885 | | |
| ALDH2 | 3 | intron 8 + 69 | cctgtgttgtccctccaccc G/A accctgtcgcccccccggtg | 5886 | | |
| ALDH2 | 4 | intron 9 + 5197 | gctttcttatgaccttggtc C/A attccccagctgtcgggccg | 5887 | | |
| ALDH2 | 5 | intron 11 + 114 | gagctgggctcagtttctcc T/C gggtcagggtgtgaggtcga | 5888 | | |
| ALDH2 | 6 | 3′flanking + 411 | ggatatgatctctgcccctc T/C tctgctgtgggcaaacagct | 5889 | | |
| ALDH2 | 7 | 3′flanking + (432-433) | tctgctgtgggtaaacagct TC/Δ tgtttcatgcatttactttt | 5890 | | |
| ALDH2 | 8 | 3′flanking + 488 | ccaataagaatgtgcttgaa G/T gcttcaggcacccaaccggt | 5891 | | |
| ALDH3A1 | 1 | 5′flanking − 758 | ctgcaggcgggtgagggtgg C/A gggaagcgcctggtgagagg | 5892 | | |
| ALDH3A1 | 2 | 5′flanking − 308 | agtccccaaagctggaagag C/T cccatgccaggctgaatcaa | 5893 | | |
| ALDH3A1 | 3 | 5′flanking − 294 | gaagagctccatgccaggct G/A aatcaatcagcagcccccac | 5894 | | |
| ALDH3A1 | 4 | 5′flanking − 3 | gtcccctcttggctcttgcc G/A ctccaggagncccagttacc | 5895 | | |
| ALDH3A1 | 8 | intron 1 + 2323 | actgtctcctttctttcgga C/T ctttgcgatgtttacaatac | 5896 | | |
| ALDH3A1 | 6 | intron 1 + 2499 | cccgatttgccactatactt T/C cgtgtattcctagcaggaat | 5897 | | |
| ALDH3A1 | 7 | intron 1 + 2943 | caggggctaccaaggcaccc A/G gggcccacgcgtctgagtga | 5898 | | |
| ALDH3A1 | 8 | intron 5 + 72 | cacacatgactgcacctaat G/C ccgtgggtccactctgagta | 5899 | | |
| ALDH3A1 | 9 | intron 7 + 633 | cgcgtgggggtctctgcgcc G/A tccaactctggcttgtttcc | 5900 | | |
| ALDH3A1 | 10 | exon 8 + 36 | cggacgtggacccccagtcc C/G cggtgatgcaagaggagatc | 5901 | | |
| ALDH3A1 | 11 | intron 9 + (40-41) | gcggcccccctctgggcccc (C) agggcggggcacactcaccc | 5902 | | |
| ALDH3A1 | 11 | intron 9 + (40-41) | gcggcctccctctgggcccc agggctgggcacactcaccc | 5903 | | |
| ALDH3A1 | 12 | intron 9 + 322 | cacagtgtggatgccctggg G/Δ acaccctagacattggccac | 5904 | | |
| ALDH3A2 | 1 | intron 1 + 39 | gggtgtggggaaacgggccc C/T cgccgcgcactcgtccactg | 5905 | | |
| ALDH3A2 | 2 | intron 3 + 2491 | tgccgcgaagaaaccggcac T/A gctgagttccacaggcagct | 5906 | | |
| ALDH3A2 | 3 | intron 3 + 2595 | ttctgtacatcaacttgtga T/A ggattgaggccagctctcct | 5907 | | |
| ALDH3A2 | 4 | intron 3 + 2775 | taccgctttgcccctgacca G/A gggcaaactcttcaataact | 5908 | | |
| ALDH3A2 | 5 | intron 3 + 3424 | aggcacttctgcacacaccc G/A cgcctcaggcatttcccctg | 5909 | | |
| ALDH3A2 | 6 | intron 3 + 3676 | atgttgaagagattcctgat G/A ttagacgttaggattcattt | 5910 | | |
| ALDH3A2 | 7 | intron 4 + 481 | tagaaaataagaggtttcac G/T ttctctctgctaaatccggt | 5911 | | |
| ALDH3A2 | 8 | intron 4 + 769 | acccggctttatacctgaac G/A tcttgcaggcagagccaaaa | 5912 | | |
| ALDH3A2 | 9 | intron 4 + 796 | aggcagagccaaaagccaca A/G ccaggagagtctgtaccgaa | 5913 | | |
| ALDH3A2 | 10 | intron 5 + 254 | attagttgtggcatatactt T/G tttcaaaaaagttaaataat | 5914 | | |
| ALDH3A2 | 11 | intron 6 + 137 | aatcctgctttctggtatac T/C gtacctgtagcttttgttat | 5915 | | |
| ALDH3A2 | 12 | intron 6 + 923 | aggcgaatgaatggcaagag G/A aaggggctatcctgattagc | 5916 | | |
| ALDH3A2 | 13 | intron 7 + 331 | tgctcttttctgatgaatcc A/Δ cacggcattgctgaataaca | 5917 | | |
| ALDH3A2 | 14 | intron 8 + 643 | tttagaacatgacctgcctg C/T ctctcccacatgtcagatga | 5918 | | |
| ALDH3A2 | 15 | intron 8 + 666 | ctcccacaggtgagatgact G/A actcagctctttatttctcc | 5919 | | |
| ALDH3A2 | 16 | intron 9 + 2129 | tgttttcatttttaaaaaaa G/T gtttgactttggaattcatg | 5920 | | |
| ALDH3A2 | 17 | exon 10 + (1894-1895) | ttggcttgtctactaataca CA/Δ tctgcttcaaaatgaacaca | 5921 | | |
| ALDH3A2 | 18 | 3′flanking + 31 | gtaggtgtcaactttttttt T/Δ ctcattttaaaattcttagc | 5922 | | |
| ALDH3A2 | 19 | 3′flanking + 106 | gtgtgttggccgtggtggtt G/A gcagctatagtaaataggtt | 5923 | | |
| ALDH3A2 | 28 | 3′flanking + 1630 | aaaagcacgtgcgaaacaca A/G ttaatcatgtcttaccgtat | 5924 | | |
| ALDH3B1 | 1 | 5′flanking − 1485 | cggcctgtccacacccacac C/T agcttgaacctcatccccac | 5925 | | |
| ALDH3B1 | 2 | intron 1 + 464 | catgaatgactctgggaaag A/G atcattcttagcaatggact | 5926 | | |
| ALDH3B1 | 3 | intron 1 + 2269 | aaatggaatccaaacagcaa G/C agacctcccctcaccggtca | 5927 | | |
| ALDH3B1 | 4 | intron 2 + 1349 | actgagcttctgccaccggc C/T gcctgccggccttcatgaga | 5928 | | |
| ALDH3B1 | 5 | intron 2 + 1820 | tccgtgtggaaggcaccttc C/G cccagcctcagtggctagga | 5929 | | |
| ALDH3B1 | 6 | intron 2 + 2046 | aacctcaggcgctgcctcag C/G cagggagccagcctggcccc | 5930 | | |
| ALDH3B1 | 7 | intron 2 + 2939 | aagcacgcactgaacatgga G/A tgagtgagtgaecgaatgaa | 5931 | | |
| ALDH3B1 | 8 | intron 3 + 7 | tgcccaagaacctggtgagc C/T ggccgggctgaggcgggcag | 5932 | | |
| ALDH3B1 | 9 | intron 4 + 36 | gccccttccggccaccctcc T/C ccgctcgaggcctcaggccc | 5933 | | |
| ALDH3B1 | 10 | intron 6 + (116-117) | attctcctctctctctctct CT/Δ ggaccaggctgggagcagtc | 5934 | | |
| ALDH3B1 | 11 | intron 6 + 263 | cagaccctcatacgtgaccc T/C gctgccccccaggctcttag | 5935 | | |
| ALDH3B1 | 12 | intron 6 + 1298 | gtagacagagctggactcca T/G ccttgggtgataagggatcc | 5936 | | |
| ALDH3B1 | 13 | intron 6 + 1411 | gccagggtcacaagcagagg C/T gggaggsgccaaggggtttg | 5937 | | |
| ALDH3B1 | 14 | exon 7 + 185 | acctgcgtggcccccgacta C/T gtcctatgcagccctgagat | 5938 | | |
| ALDH3B1 | 15 | exon 7 + 339 | tgcgggcattgctgggctgc G/A gcgtgtggccattgggggcc | 5939 | | |
| ALDH3B1 | 16 | intron 7 + 249 | ccagggctccagggctcagc G/A tgctaagatgaactcccatc | 5940 | | |
| ALDH3B1 | 17 | intron 7 + 277 | atgaactcccatcccaccac C/T ggctatcctgaaaggctgta | 5941 | | |
| ALDH3B1 | 18 | intron 7 + 498 | gaccaaggtcgggggattct C/T tgtgtcccacaggccctgag | 5942 | | |
| ALDH3B1 | 19 | intron 8 + 14 | cagccaggtgggggtgcggc C/T gggctgggcagggtcaggag | 5943 | | |
| ALDH3B1 | 20 | intron 8 + 49 | caggagcccgcagtgggcag C/T acaagtggtggcagcagggg | 5944 | | |
| ALDH3B1 | 21 | intron 8 + 111 | tcaggactttgggatggtgg A/T cctcttagctctgtctctgc | 5945 | | |
| ALDH3B1 | 22 | intron 8 + 3219 | atcctgatggggctcaaggc A/G gcctcacgcacatcctgttc | 5946 | | |
| ALDH3B1 | 23 | exon 9 + 33 | gtgctgacccagaccagcag C/T gggggcttctgtgggaagga | 5947 | | |
| ALDH3B1 | 24 | intron 9 + 946 | tcccaggcccccgagctgac C/A cttcttggtggccgtggccc | 5948 | | |
| ALDH3B1 | 25 | intron 9 + 1067 | aggctccccaagcctgggtc C/T ctcttgcccccacccactct | 5949 | | |
| ALDH3B1 | 26 | exon 10 + 137 | ccgcaatcgccgcgccgcct G/A aggatgctgctggtggccat | 5950 | | |
| ALDH3B1 | 27 | exon 10 + 397 | cgctcccaaccatcagagcc G/A aggtgggaggcatgggaaac | 5951 | | |
| ALDH3B1 | 25 | exon 10 + 1198 | ctcttccccatgctgctcat C/T ctcctgggccccatccactc | 5952 | | |
| ALDH3B1 | 29 | exon 10 + 1475 | caggggtggaggtgagtttc G/A tctcctgtctctctggctga | 5953 | | |
| ALDH3B1 | 30 | 3′flanking + 15 | cctggcaatacttacatcct A/G gtgatttgctttctgtgcat | 5954 | | |
| ALDH3B1 | 31 | 3′flanking + 60 | caacagggctgtggaccaag G/C ccctggcgttgggtaacaat | 5955 | | |
| ALDH3B2 | 1 | intron 1 + 98 | agggaaggggatgtgtgccc G/A tggcccgtgggtcagggggc | 5956 | | |
| ALDH3B2 | 2 | intron 1 + 157 | atggctccaggggccatggg T/C acggggcttcctcaggacag | 5957 | | |
| ALDH3B2 | 3 | intron 1 + 354 | tctgtggacagacaaggatt C/G ggtcgggggcaccagggctg | 5958 | | |
| ALDH3B2 | 4 | intron 1 + 851 | tatgacaggtccatcaggcc T/G caccttcctgtgtgtcttat | 5959 | | |
| ALDH3B2 | 5 | intron 1 + 894 | ctcagcatctgcccccacag T/G gcttttgcacacgttggttc | 5960 | | |
| ALDH3B2 | 6 | intron 1 − 463 | aaagaaccctcccagtccct C/G gtttagtcccagaagggagg | 5961 | | |
| ALDH3B2 | 7 | exon 2 + 61 | gccttcaactgagggcgcac G/A cggccggccgagttcggggc | 5962 | | |
| ALDH3B2 | 8 | intron 2 + 9 | ggacctgcataaggtgggcc A/G tggagaatgggccggggcag | 5963 | | |
| ALDH3B2 | 9 | intron 2 + 23 | gggccgtggagagtgggccg G/C ggcaggggctggagcagcgt | 5964 | | |
| ALDH3B2 | 10 | intron 2 + (180-181) | ttcactcctgaacactcaca (A) gccaccctgtgatgcagact | 5965 | | |
| ALDH3B2 | 10 | intron 2 + (180-181) | ttcactcctgaacactcaca gccaccctgtgatgcaggct | 5966 | | |
| ALDH3B2 | 11 | exon 3 + 72 | gactacgctctcaagaacct T/G caggcctggataaagcatga | 5967 | | |
| ALDH3B2 | 12 | intron 8 + 375 | ctgcagcatcctaacctcac C/T gtcgcgactcaaggctgccg | 5968 | | |
| ALDH3B2 | 13 | intron 8 + 463 | aatcacccccatggcacccc G/A accgtcactgacagggtgct | 5969 | | |
| ALDH3B2 | 14 | exon 9 + 33 | atgctggagcggaccagcag C/A ggcagctttgcaggcaatga | 5970 | | |
| ALDH3B2 | 15 | exon 10 + 428 | aggtgtcctcactcacccca C/T cctcccnaattccagccctt | 5971 | | |
| ALDH5A1 | 1 | 5′flanking − 1303 | gaaattgattaaactctact G/A ttatcgcttctgccatatgt | 5972 | | |
| ALDH5A1 | 2 | 5′flanking − 301 | gtgaaaaggtgacagcagtc C/T gcaggtgcatctactggcga | 5973 | | |
| ALDH5A1 | 3 | 5′flanking − 221 | ggtcgcgccaggagagaagc C/T gcgcggcgcttagggcaagg | 5974 | | |
| ALDH5A1 | 4 | 5′flanking − 175 | agggcggcgcggcggtgcag C/G gagaaagacgcggagagagc | 5975 | | |
| ALDH5A1 | 5 | 5′flanking − 174 | gggcggcgcggcggtgcagc G/A agaaagacgcagacaaacgg | 5976 | | |
| ALDH5A1 | 6 | exon 1 + 106 | gcggcctggtccctgcctcc G/C ggcctgcgcccgcggcggcc | 5977 | | |
| ALDH5A1 | 7 | intron 1 + 326 | cctaaccgtggaggggcggg G/A agaaaggggaggggtgtcac | 5978 | | |
| ALDH5A1 | 8 | intron 1 + 5551 | gtctgtacaaaaaaaatttt T/G ttttaattagctcagcatga | 5979 | | |
| ALDH5A1 | 9 | intron 1 + 5585 | gtacaaaaaaaatttttttt T/Δ aattagctgagcatgatgat | 5980 | | |
| ALDH5A1 | 10 | intron 2 + 306 | gttttggttgtttttttttt T/Δ aaacttgtttttgtacattt | 5981 | | |
| ALDH5A1 | 11 | exon 3 + 107 | cggagacattatccacaccc C/T ggcaaaggacaggcgggccc | 5982 | | |
| ALDH5A1 | 12 | intron 3 + 201 | gtggtggcagtgagtggaat G/T atgcatttctaatgcctgca | 5983 | | |
| ALDH5A1 | 13 | exon 4 + 42 | atcacccggaaggtgggggc C/T gccctggcagccggctgtac | 5984 | | |
| ALDH5A1 | 14 | intron 4 + 2306 | atcgtcjcttataaatcagt T/C tgctaggtataaaatccttg | 5985 | | |
| ALDH5A1 | 15 | intron 4 + (2334-2346) | tataaaatccttggctcaca (T)11-13 acttgattatcttaaatgta | 5986 | | |
| ALDH5A1 | 16 | intron 4 + 2456 | tataagtcaacttttttttt T/Δ acctagatacacaaaagtgt | 5987 | | |
| ALDH5A1 | 17 | intron 4 + 2501 | tttggtttttttcggccttt A/G tctttaaaaaccaataatgt | 5988 | | |
| ALDH5A1 | 18 | intron 4 − (64-46) | atctatttatttctcttttc (T)16-18 cagtttggtaaattgttggc | 5989 | | |
| ALDH5A1 | 19 | intron 4 − 27 | ttcagtttggtaaattgttg G/C cacatgtttcctgtttctct | 5990 | | |
| ALDH5A1 | 20 | intron 5 + (4621-4624) | tttgaatagataaacactta CTTA/Δ tatggttgaaaaattaacac | 5991 | | |
| ALDH5A1 | 21 | intron 5 + (4677-4678) | accatgacaagtctcaccct (C) accccaaccctgactcacct | 5992 | | |
| ALDH5A1 | 21 | intron 5 + (4677-4678) | accatgacaagtctcaccct accccaaccctgactcactc | 5993 | | |
| ALDH5A1 | 22 | intron 7 + (432-443) | aaaaaatgatgttaaaaggc (A)10-12 tgaaaacaaaaaagtcattt | 5994 | | |
| ALDH5A1 | 23 | intron 7 + (3243-3244) | cagtccttgtgtgtgtgtgt GT/Δ cccccaaacacactgctgga | 5995 | | |
| ALDH5A1 | 24 | intron 7 + 4957 | tttttgaaaaaaaaaaaaaa A/Δ tggaactagttatacttttc | 5996 | | |
| ALDH5A1 | 25 | intron 8 + 2717 | gatcacctggaactcacagg C/T gtggtaggagacgtgcagcc | 5997 | | |
| ALDH5A1 | 26 | 3′flanking + 2711 | cagtgagtgccttggggaag G/A agccagcatgtgaaatcatg | 5998 | | |
| ALDH5A1 | 27 | 3′flanking + 2777 | gtccatggtgtgcgcttata G/A aatgtttgctaaactgaact | 5999 | | |
| ALDH6A1 | 1 | 5′flanking − 1303 | ctctaaagcagaaccaagag G/C aaaagcatgggagtatacca | 6000 | | |
| ALDH6A1 | 2 | 5′flanking − (1273-1270) | ggagtctaccaaaacaactt AATT/Δ gttacttgaaatgacttgca | 6001 | | |
| ALDH6A1 | 3 | intron 1 + 437 | tgcccttgctcccttccccc A/T ccctacttcactatccatgg | 6002 | | |
| ALDH6A1 | 4 | intron 1 + 835 | gttcccaccccaaaatgagc T/Δ cttctagtgctacacaccgt | 6003 | | |
| ALDH6A1 | 5 | intron 1 + 1294 | atattccttgctgcgatcct T/C gttctgttctagtatctttt | 6004 | | |
| ALDH6A1 | 6 | intron 1 + 1447 | gagtcattgagaaccttaag A/G aagtattttgtccttttcca | 6005 | | |
| ALDH6A1 | 7 | intron 1 + 2536 | agtcttgccatctctttcta T/C gttagccactgacataggct | 6006 | | |
| ALDH6A1 | 8 | intron 1 + 2703 | caggagagcaaggacttcct G/T ataaagcatatagcaagtag | 6007 | | |
| ALDH6A1 | 9 | intron 2 + 2802 | gcaacaatgctaatgggtgt T/C tcttagcaaatgaagaaaag | 6008 | | |
| ALDH6A1 | 10 | intron 2 + 2333 | gtttgtttgtttgtttgttt G/Δ tttttttcagccaactgtaa | 6009 | | |
| ALDH6A1 | 11 | intron 4 + 138 | gactctctcccttgtactgc A/G tctcctccagtcttattctt | 6010 | | |
| ALDH6A1 | 12 | intron 4 + 200 | aaagaggaacattcttgcat T/C aatttctatttgtgtgtctt | 6011 | | |
| ALDH6A1 | 13 | intron 5 + 291 | ggcaagtcagtgtaccctgc G/A ccccttcattggcctgaacc | 6012 | | |
| ALDH6A1 | 14 | intron 7 + 209 | tcccgggttcaagcgattct G/A ctgcctcagcctccccacta | 6013 | | |
| ALDH6A1 | 15 | intron 8 + 287 | gcctcctgagcagcttggac C/T acaggtgcgggccaccacct | 6014 | | |
| ALDH6A1 | 16 | intron 9 + 877 | gatatcaaaatataaacata C/T agacatatttgggaggcaaa | 6015 | | |
| ALDH6A1 | 17 | intron 9 + 885 | aatataaacatacagacata T/G ttgggaggcaaaggagtgaa | 6016 | | |
| ALDH6A1 | 18 | intron 11 + 40 | ttttgtcttttcctttaaga A/C attttcttaaagatattcag | 6017 | | |
| ALDH6A1 | 19 | 3′flanking + 520 | cctgcaaagttttctttagc C/T cctcttttatcccacaatac | 6018 | | |
| ALDH6A1 | 20 | 3′flanking + 1026 | cgtgttggtcaggctggtct T/C gaactcctgacctcaggtga | 6019 | | |
| ALDH6A1 | 21 | 3′flanking + 1035 | caggctggtctcgaactcct G/C acctcaggtgatccgcctgc | 6020 | | |
| ALDH8A1 | 1 | 5′flanking − (837-836) | gctgaacattgttaatatat (AT) tcattagccaattgtgttcc | 6021 | | |
| ALDH8A1 | 1 | 5′flanking − (837-836) | gctgaacattgttaatatat tcattagccaattgtgttcc | 6022 | | |
| ALDH8A1 | 2 | 5′flanking − 702 | gggatctgaagcccttgcta C/T atgtgtcacacatgtttttg | 6023 | | |
| ALDH8A1 | 3 | 5′flanking − 642 | gcacatctaggaagatgtga G/A cagccactgtggccccggtt | 6024 | | |
| ALDH8A1 | 4 | 5′flanking − 84 | atgctctctgagagcgtcag G/T tgccctcccacattcactga | 6025 | | |
| ALDH8A1 | 5 | intron 1 + 5437 | gcattggttgaaatggagcg T/C gtttctttgtttctatggta | 6026 | | |
| ALDH8A1 | 6 | intron 1 + (5836-5855) | gtcagaatccatctaaaaaa (CAAAA)4-5 atgagctgtgtggagacct | 6027 | | |
| ALDH8A1 | 7 | ercn 3 + 146 | cactacacggtgcgggcccc G/T gtgggagtcggtgagtgctg | 6028 | | |
| ALDH8A1 | 8 | intron 4 + 1033 | aggtctttttgctatgtcac C/T ccacggccagggcaggagtg | 6029 | | |
| ALDH8A1 | 9 | intron 4 + 1037 | ctttttgctatgtcacccca C/T ggccagggcaggagtgctgg | 6030 | | |
| ALDH8A1 | 10 | intron 4 + 1662 | tctctcctgagaccaagaac G/A tctggatagatgatgagtta | 6031 | | |
| ALDH8A1 | 11 | intron 4 + 2046 | agtcctgggcatttaaacag A/C cttgacagataaacttcctt | 6032 | | |
| ALDH8A1 | 12 | intron 6 + 1146 | ttttccagatgcaagagact C/G ccttgttctctctccttctg | 6033 | | |
| ALDH8A1 | 13 | intron 6 + 1744 | ttcttcttcttcttcttctt C/T tttcttttttaacatgtact | 6034 | | |
| ALDH8A1 | 14 | intron 6 + 9802 | tgagtgtgaattctaacttt A/T ctgtttattagctctatgaa | 6035 | | |
| ALDH8A1 | 15 | exon 7 + (1089-1098) | tacagtgagaccttgtcttt (A)9-10 tgctgcaaaaccaaaaataa | 6036 | | |
| ALDH8A1 | 16 | 3′flanking + 848 | ctcagctgagtccccttgac T/C ttaatcactttagtgaagaa | 6037 | | |
| ALDH9A1 | 1 | exon 1 + 121 | actgtgtggggtatggcggg G/A tggtggggagaatgtggtgt | 6038 | | |
| ALDH9A1 | 2 | intron 1 + 67 | cgcggatttcccggccagcc C/G ccgtttcctgtgttctgcag | 6039 | | |
| ALDH9A1 | 3 | intron 1 + 103 | tgcagcgttgacttgagcac A/G agacagtgacagtggagagt | 6040 | | |
| ALDH9A1 | 4 | intron 1 + 1818 | gaatttttgagaaaaaaaaa A/Δ tgttcctttggggttgcctt | 6041 | | |
| ALDH9A1 | 5 | intron 2 + 5891 | tcaggaacaggaagtaaaga G/A gtttacatttctaaatttct | 6042 | | |
| ALDH9A1 | 6 | intron 2 + 6398 | atcaaaaacanttgtctgat T/G atcgtgctctgaacctgcct | 6043 | | |
| ALDH9A1 | 7 | intron 2 + 9677 | atgacgctgagtttggtgct A/G ttcttttgtttttcttgcct | 6044 | | |
| ALDH9A1 | 8 | intron 2 + 9991 | gggagaagtgagggacctac C/T cttggcttctaatctttcat | 6045 | | |
| ALDH9A1 | 9 | intron 2 + 10198 | ttgtcagagacatctttgat A/G atccttacgtactatatcag | 6046 | | |
| ALDH9A1 | 10 | intron 2 + 10256 | ttagtagataactttttttt T/Δ gtaaggatggagaataatag | 6047 | | |
| ALDH9A1 | 11 | intron 2 + 11382 | catattcaattcttttatgt T/C ctttagaccaaagaaaggca | 6048 | | |
| ALDH9A1 | 12 | intron 2 + 11455 | taaacctttaagctcatcat C/T ggaccatctattgaatttct | 6049 | | |
| ALDH9A1 | 13 | intron 2 + 12044 | atttaaagtgaaagctattt C/T tagttttaaaaattgagcag | 6050 | | |
| ALDH9A1 | 14 | intron 3 + 334 | ctatttagcaaActtttttt T/Δ gacagtgtataaagttttca | 6051 | | |
| ALDH9A1 | 15 | intron 3 + 368 | gttttcaacaattgatattg G/Δ aaggttggtagggcctagga | 6052 | | |
| ALDH9A1 | 16 | intron 4 + 191 | ccctcaaggagcttatagtt T/A aggttgtacacaatcatgtc | 6053 | | |
| ALDH9A1 | 17 | intron 4 + 557 | tagaacaaattgtaatgtta A/G aaagcattactgttaggaca | 6054 | | |
| ALDH9A1 | 18 | intron 5 + 830 | agttcaagatgattttgtag G/C ttcagggcctagttgactta | 6055 | | |
| ALDH9A1 | 19 | intron 5 + 838 | atgattttgtaggttcaggg C/T ctagttgacttagcatgcaa | 6056 | | |
| ALDH9A1 | 20 | intron 6 + 120 | agaaaagttgcacaaatagt A/C caaagaattcccatgtacct | 6057 | | |
| ALDH9A1 | 21 | intron 6 + 2569 | attaaaatctgctttaaata T/C ttttttgggggagaggacac | 6058 | | |
| ALDH9A1 | 22 | intron 8 + 1414 | ccgatcttcaaaaaattagc T/C gggggtggtggtgcacactg | 6059 | | |
| ALDH9A1 | 23 | intron 9 + 664 | aaagttcacatttttttttt T/Δ ataacttcatggtcaagagc | 6060 | | |
| ALDH9A1 | 24 | intron 9 + 2170 | taatgcacacattttttttt T/Δ cttcatagggacatccaacg | 6061 | | |
| ALDH9A1 | 35 | exon 11 + 587 | aaaacaaaaaacaaaaaaaa A/Δ ccttgttcctttataggttc | 6062 | | |
| ADH1 | 1 | (5′flanking region − 55) | atcatgtgtggaactggaat C/T gggtgttattcaagcaaaaaa | 6063 | | |
| ADH1 | 2 | (intron 1 268) | acatttgcggtaaagcgata A/G tttattccaagctaatcatg | 6064 | | |
| ADH1 | 3 | (intron 3 443) | aatgga g/c gctacatggctat G/A gctgaatgagcatgaccttt | 6065 | | |
| ADH1 | 4 | (intron 6 56) | tacaacttggaggatgcatt T/G aggctgcagaatatatgttt | 6066 | | |
| ADH1 | 5 | (intron 8 74) | gtctagcagaaaatgaaaag G/A tggaaggatgagaaaaatta | 6067 | | |
| ADH2 | 1 | (intron 2 340) | ctattttttaaagcgtgcat T/C cttacataagacttaaatat | 6068 | | |
| ADH2 | 2 | (intron 3 91) | aaggcaatgagagaggaaag T/G gcttgcacaaggtcaccgcg | 6069 | | |
| ADH2 | 3 | (intron 3 205) | atgtattgtacccttcaacc A/G ttatgtaccgagtatctact | 6070 | | |
| ADH2 | 4 | (intron 7 108) | acaattgacaaggcaagatt T/C tgaaaacaaatcaaaaataa | 6071 | | |
| ADH2 | 5 | (intron 3 1721-1723) | actgcatagaaatttaagaa GAA/Δ cttgttttattcctctccag | 6072 | | |
| ADH2 | 6 | (3′untranslated region | gttaatgctttcccaccttc AG/Δ gggaaggatttgaattttga | 6073 | | |
| | | 2305-2306) | | | | |
| ADH3 | 1 | (5′flanking region − 254) | tgagagaagagaagcaggaa C/G ttgagagaggaggaagagag | 6074 | | |
| ADH3 | 2 | (intron 2 355) | tatgccttcttctatattat A/G caagacaaaaattttaggat | 6075 | | |
| ADH3 | 3 | (intron 3 32) | acactcagggaacatgcctt G/A gttcaccatcacaagattag | 6076 | | |
| ADH3 | 4 | (intron 4 6) | ctgcttgaaaaatgagtaag C/T ttctgatgctttctttgcac | 6077 | | |
| ADH3 | 5 | (coding region 453 | agcaccttctcccagtacac A/G gtggtggatgagaatgcagt | 6078 | | |
| | | (Thr 151 Thr)) | | | | |
| ADH3 | 6 | (coding region 815 | ttcgtttgaagtcatcggtc A/G gcttgacaccatggtatgat | 6079 | | |
| | | (Arg 272 Gln)) | | | | |
| ADH4 | 1 | (5′flanking region − 482) | acagccagagacccagaacc A/C tcagggctggttgatggact | 6080 | | |
| ADH4 | 2 | (5′flanking region − 437) | catcaggtgggacaaaaaga G/A tagctccttagcagtgacta | 6081 | | |
| ADH4 | 3 | (5′flanking region − 234) | actcaagcatatgtgcaacc A/G agtacatgaaaagaatttgt | 6082 | | |
| ADH4 | 4 | (5′untranslated region − 3) | ggtaagttaaatgggcgatt C/G tgaggagtagaaatttcctt | 6083 | | |
| ADH4 | 5 | (5′untraslated region − 2) | ttcaataaaagaaaaaagaa T/A ttaaaaaatcttggagctca | 6084 | | |
| ADH4 | 6 | (intron 1 707) | ttatatttgaaattaaaaat A/G taatttgaggctagaaaaaa | 6085 | | |
| ADH4 | 7 | (intron 5 619) | tcaaagagggatctcacaat T/C ggacatctcaacctgcttat | 6086 | | |
| ADH4 | 8 | (intron 5 1755) | tttacgcacacaattactca T/C taataaaaaatttaaaaaat | 6087 | | |
| ADH4 | 9 | (intron 5 3425) | actgagactctggagcaata T/C aitaagaatcatactgaaca | 6088 | | |
| ADH4 | 10 | (intron 1 1181-1189) | ggtaaactttaatacacctg (T)9-11 caagaaataaaaaatgtaat | 6089 | | |
| ADH4 | 11 | (intron 5 2828) | tccagtcaaagtcgacctaa A/Δ tttccaggagttgttcttcc | 6090 | | |
| ADH4 | 12 | (intron 7 15) | ttggtggtcagttttttttt T/Δ cttcatagctttaaattctt | 6091 | | |
| ADH5 | 1 | (5′flanking region − 115) | taactgctgtaaagttacac G/A g/a ggaagccctttcccgacaa | 6092 | | |
| ADH5 | 2 | (5′flanking region − 114) | aactgctgtaaagttacac g/a G/A ggaagccctttcccgacaaa | 6093 | | |
| ADH6 | 1 | (intron 3 249) | tgaaactggccttgaaagta C/A aaatgagacaaaaatttatg | 6094 | | |
| ADH6 | 2 | (intron 6 1072) | taacccctatactgtattgc A/G tcactttctaacaggcagct | 6095 | | |
| ADH6 | 3 | (coding region 885 | gtctgtgtggttgttggggt G/A ttgcctgccagtgttcaact | 6096 | | |
| | | (Val 295 Val)) | | | | |
| ADH6 | 4 | (intron 7 1292) | gttgagaaacactgcctagt C/A ccgtctgtggtcctggaatt | 6097 | | |
| ADH6 | 5 | (intron 7 1616) | ctatcacagaataatccgca T/C agaacactaagcagattacg | 6098 | | |
| ADH7 | 1 | (5′flanking region − 520) | tgtgcagacacagaaagttt T/C acttaactttctacacctaa | 6099 | | |
| ADH7 | 2 | (intron 1 361) | tcagtagcatgtgctgcact C/T gctgcagtagttcaatggga | 6100 | | |
| ADH7 | 3 | (intron 3 183) | aacctcaacctttagaaggc A/G aaccttacggtgtttataaa | 6101 | | |
| ADH7 | 4 | (intron 4 76) | tgaattgaattaattaatac G/A tgtatttgatgtatcaaaca | 6102 | | |
| ADH7 | 5 | (intron 6 615) | tggcatagcgtaaagagact T/A ggaaaaatggaataaagcca | 6103 | | |
| ADH7 | 6 | (intron 8 532) | aagtctaaccatatcaccaa T/C ttagtatgccattgtactat | 6104 | | |
| ADH7 | 7 | (intron 8 651) | gctctgatttatttcaagta G/A gccacaaaatttccttattt | 6105 | | |
| ADH7 | 8 | (intron 8 727) | ttcagatccctgtaagccag G/A tattatttttaccattttta | 6106 | | |
| ADH7 | 9 | (intron 8 1207) | tctccacatttggtctagcc T/C acaggatcatcatattatga | 6107 | | |
| ADH7 | 10 | (intron 8 1691) | tccctcatctcattgcccac G/A ctcattgctttaattcagtc | 6108 | | |
| ADH7 | 11 | (3′untranslated region 13 | atttacattttgtaaggcta T/C aattgtatcttttaagaaaa | 6109 | | |
| ADH7 | 12 | (3′untranslated region 14 | gatatagtaaatgcatctcc T/C agagtaatattcacttaaca | 6110 | | |
| ADH7 | 13 | (3′untranslated region 15 | aaacacttgttatgagttaa C/G ttggattacattttgaaatc | 6111 | | |
| ADH7 | 14 | (3′untranslated region 18 | aatataaacatagagctaga A/G tcatattatcatacttatca | 6112 | | |
| ADH7 | 15 | (3′flanking region 865) | tacatcaaaagaaataaatc C/T aagaaggaataaacacattt | 6113 | | |
| HEP27 | 1 | (5′flanking region − 191) | tcagcactctgtgtctagct A/T aaggtttgtaaatgcaccaa | 6114 | | |
| HEP27 | 2 | (5′untranslated region − 1) | gaacccatcaattccgtaca C/A attttggtgactttgaagag | 6115 | | |
| HEP27 | 3 | (intron 1 1941) | aaatttaccctaaccagcct G/C actctctgccactttctgtt | 6116 | | |
| HEP27 | 4 | (coding region 211 | ttgtgtgccacgtggggaag G/A ctgaggaccgggagcagctg | 6117 | | |
| | | (Ala 97 Thr)) | | | | |
| HEP27 | 5 | (intron 4 1070) | tgtctcagttcacaggatca T/C gactctttttctcgaaactg | 6118 | | |
| HEP27 | 6 | (3′flanking region 362) | ggctttgtgtgtgctccatt A/G tctgaactgggcctgctggg | 6119 | | |
| UGT1A1 | 1 | (5′flanking region − 1337 | tctttcccttttgacttcaa A/C tcagtcatcagaatttcccc | 6120 | | |
| UGT1A1 | 2 | (coding region 211 | cctcgttgtacatcagagac G/A gagcattttacaccttgaag | 6121 | | |
| | | (Gly 71Arg)) | | | | |
| UGT1A1 | 3 | (intron 1 2925) | gcatttgggaagggaaaatc T/G aattaaaagcctaaactaaa | 6122 | | |
| UGT1A1 | 4 | (intron 1 3442) | agactcggccttttccagat G/T agcttcagtgtaagagtggg | 6123 | | |
| UGT1A1 | 5 | (intron 1 3512) | ttaagtaagccatttaccaa C/T gctcagaagaaagaacttga | 6124 | | |
| UGT1A1 | 6 | (intron 1 3665) | tcttgctacaaaccaaaaaa T/C gcagcatggtggtggggagg | 6125 | | |
| UGT1A1 | 7 | (intron 2 15) | cagacagtaagaagattcta T/C accatggcctcatatctatt | 6126 | | |
| UGT1A1 | 8 | (intron 4 574) | agatttaaaactccaattta C/T ataaaaagttcccataatag | 6127 | | |
| UGT1A1 | 9 | (3′flanking region 125) | tatagaggttcacacacaca C/T gccttcattgcgtgtgcatg | 6128 | | |
| UGT2A1 | 1 | (5′flanking region − 1602) | ataacatcttctgcagagaa A/C cttcaatggaaatacactca | 6129 | | |
| UGT2A1 | 2 | (5′flanking region − 1480) | tacagattatctttggtgat G/C ggagagcttagaagagacat | 6130 | | |
| UGT2A1 | 3 | (5′flanking region − 1406) | atttcagaagatttattaac A/T tgaaaaggatcactctg c/t tt | 6131 | | |
| UGT2A1 | 4 | (5′flanking region − 1388) | acatggaaaggatcactctg C/T ttattcacagacatatgcat | 6132 | | |
| UGT2A1 | 5 | (5′flanking region − 935) | aaattattcaatctctttgg G/A cagtggtttctttttctttg | 6133 | | |
| UGT2A1 | 6 | (intron 1 535) | cattgatcaggctgatttat C/T catgctaagcttatttaatt | 6134 | | |
| UGT2A1 | 7 | (intron 1 642) | tatattgatcatgttgatac A/C tttatacacatatttgtcta | 6135 | | |
| UGT2A1 | 8 | (intron 1 1448) | aggtgcttacaggcaacatc C/T acatagcagtctgtggctgg | 6136 | | |
| UGT2A1 | 9 | (intron 1 2000) | gacacattagcttcttttct A/G cagatctctgttctaaaaca | 6137 | | |
| UGT2A1 | 10 | (intron 1 3118) | cttaaaattctttaatgaaa T/G cattgcaacaaatttatatc | 6138 | | |
| UGT2A1 | 11 | (intron 1 3191) | ataaatagaacaactcccta A/T gtttacttctctgcagtgga | 6139 | | |
| UGT2A1 | 12 | (intron 1 3770) | atcaccagataatttactat C/T cattaaggagtaggtcatca | 6140 | | |
| UGT2A1 | 13 | (intron 1 4584) | tgattggttagaatctttga A/C aaatcttctagtatcattcc | 6141 | | |
| UGT2A1 | 14 | (intron 1 4854) | tactctgtgcattgttaata G/A cctatcacttgtggtctgcc | 6142 | | |
| UGT2A1 | 15 | (intron 1 − 19146) | ctgtttaaattctcattcaa C/T ggccacatggttaaaataaa | 6143 | | |
| UGT2A1 | 16 | (intron 1 − 19085) | tagacaaagaccctttcaat A/C aacaaagttagaaatgtgtt | 6144 | | |
| UGT2A1 | 17 | (intron 1 − 18346) | atggcaatatttttagaaat G/A ttaactcccaataatgaata | 6145 | | |
| UGT2A1 | 18 | (intron 1 − 18218) | tatatcattattttaactta T/G agatagcactagccctaatt | 6146 | | |
| UGT2A1 | 19 | (intron 1 − 17937) | ctcctaataatttggactca C/T catacttattcagcactatc | 6147 | | |
| UGT2A1 | 20 | (intron 1 − 12585) | ttccacacagggacaagtca A/G cagaggaaatttttcttgct | 6148 | | |
| UGT2A1 | 21 | (intron 1 − 11430) | eacaaaggtttattttctta C/G agttctgatggctagaggtc | 6149 | | |
| UGT2A1 | 22 | (intron 1 − 10761) | tttaaaatatgcatgtattt T/G ccacttttaaaaactatatc | 6150 | | |
| UGT2A1 | 23 | (intron 1 − 381) | aaatcctccctccttccttc C/T tttcccaggccccactctac | 6151 | | |
| UGT2A1 | 24 | (intron 1 − 329) | ttccctttctccttttctcc A/G tctctctctcttcctctctc | 6152 | | |
| UGT2A1 | 25 | (intron 1 − 41) | ttttctcctcagcaaacata T/A aagctaatttcctccatcca | 6153 | | |
| UGT2A1 | 26 | (intron 2 263) | caccttgatactggacttgg T/C gggacagaaaaccagatcat | 6154 | | |
| UGT2A1 | 27 | (intron 2 454) | agaaagcccattgaaataag G/C cagggtttttaggttttaat | 6155 | | |
| UGT2A1 | 28 | (intron 2 554) | aaaaacttttttgagttgac A/T atggtgagtttagtttctga | 6156 | | |
| UGT2A1 | 29 | (intron 2 1113) | ctgcaggcaagctctagtga A/T tgtttattataggaaataat | 6157 | | |
| UGT2A1 | 30 | (coding region 922 (Gly308) | gtgttgtggtattttctgtg G/A gatcaatggtcaaaaacctt | 6158 | | |
| UGT2A1 | 31 | (intron 3 − 217) | aagcttagaagtgataaata T/C caaaacaataatactatcct | 6159 | | |
| UGT2A1 | 32 | (intron 3 − 194) | aaacaataatactatagtgg G/A tagactattagtacaagact | 6160 | | |
| UGT2A1 | 33 | (coding region 1171 | acggagtccctatggtggga G/A ttcccatgtttgctgatcag | 6161 | | |
| | | (Val391Ile)) | | | | |
| UGT2A1 | 34 | (intron 5 1546) | tttttaaaattcagaaactc A/G g/a ttatggtgtattcttacaa | 6162 | | |
| UGT2A1 | 35 | (intron 5 1547) | ttttaaaattcagaaacct a/g G/A ttatggtgtattcttacaaa | 6163 | | |
| UGT2A1 | 36 | (intron 5 2505) | taattgacttttattaatac G/A tacatgttgtataagtcata | 6164 | | |
| UGT2A1 | 37 | (intron 5 2639) | tagactattacaaagttgtt A/G gttgctgacaattttgttca | 6165 | | |
| UGT2A1 | 38 | (intron 5 4009) | gaatccaggctggaactttt C/A ttccagacacaaaccaaaat | 6166 | | |
| UGT2A1 | 39 | (intron 5 4311) | atacagacactgtccttttc C/A tcacaaacatacagatgtgt | 6167 | | |
| UGT2A1 | 40 | (intron 5 4616) | acttttttatgtctacattt G/C atcatactgtgttcagcata | 6168 | | |
| UGT2A1 | 41 | (intron 5 4717) | tgcaagaattatattttctc C/A acgtaactatggccttaaac | 6169 | | |
| UGT2A1 | 42 | (coding region 1524 | gctatatttttggtcataca A/G tgttgtttgttttcctgtca | 6170 | | |
| | | (Gln508Gln)) | | | | |
| UGT2A1 | 43 | (3′untranslated region 1 | aaggagtttaacaaaaacac G/A tctcccatcctgtttccaaa | 6171 | | |
| UGT2A1 | 44 | (3′flanking region 685) | aatctagaaaataattatca T/C ttttataaaatttttagtca | 6172 | | |
| UGT2A1 | 45 | (intron 1 (−18967)-(−18965) | ctcccaattagattgattag TAT/Δ gagttcctggggttactggt | 6173 | | |
| UGT2A1 | 46 | (intron 1 (−18862)-(−18803) | aatacattcttcccccttca (AC)14-17 atacttactggcctatttat | 6174 | | |
| UGT2A1 | 47 | (intron 1 (−17463)-(−17447) | aaacttagaaacctctattc (A)16-27 gtaaagaaaatggcagagaa | 6175 | | |
| UGT2A1 | 48 | (intron 1 − 10860) | attcaatgcaactttttttt T/Δ gtaatggcagaattagaaca | 6176 | | |
| UGT2A1 | 49 | (intron 2 528-538) | ctgttaggaaacaattggtt (A)8-10 cttttttgagttgacA/Tatgg | 6177 | | |
| UGT2A1 | 50 | (intron 2 1514-1533) | ttgtgtgtatgtgtatgttt (GT)9-11 tattttaatgaattaatatc | 6178 | | |
| UGT2A1 | 51 | (intron 5 916-917) | gcttagtatattatatatat AA/Δ gtctatatatatagcttagt | 6179 | | |
| UGT2A1 | 52 | (intron 5 1163) | caatatttatgtcatttttt T/Δ ctcacatttactgtgtttcc | 6180 | | |
| UGT2A1 | 53 | (intron 5 3819-3038) | agacagacagacacacaaac (AC)8-12 tcaacacatgtaaactactc | 6181 | | |
| UGT2A1 | 54 | (intron 5 4785) | tatcttcaatgaaaataaaa A/Δ caaaaattgtccaatttctg | 6182 | | |
| UGT2B15 | 1 | (5′flanking region − 277) | ccgaacaggcaggagcctct C/A acttgccactgttcttaaca | 6183 | | |
| UGT2B15 | 2 | (intron 1 670) | catcaaagaaaataggggcc A/T aattaagggagagcacatat | 6184 | | |
| UGT2B15 | 3 | (intron 1 775) | ctaattatattaagatctta A/C gatgaaccaagacagtagta | 6185 | | |
| UGT2B15 | 4 | (intron 2 2183) | cagagtttcaccatgttggc C/T aggctggtcttgaactcctg | 6186 | | |
| UGT2B15 | 5 | (intron 2 2430) | tatttcaaaagaataagact C/G ttgccaaaaagtatcaagtg | 6187 | | |
| UGT2B15 | 6 | (intron 2 4806) | aaaaaattactccaatagct C/T ctga c/g cctctcatcttagat | 6188 | | |
| UGT2B15 | 7 | (intron 3 129) | ctaattatctcagacatgtg T/C tcaaa g/a caaaaacatatatg | 6189 | | |
| UGT2B15 | 8 | (intron 3 424) | caataacaataagcaggtat T/C gaaaaaactttgaaatgcat | 6190 | | |
| UGT2B15 | 9 | (intron 3 493) | ggc t/a gtttttacttcccatg C/T attggaataggtctatttag | 6191 | | |
| UGT2B15 | 10 | (intron 3 906) | gccctctctgaatgatctat G/A caagtccttgctgaaaacac | 6192 | | |
| UGT2B15 | 11 | (intron 3 1036) | tcagtaccttagtttggtac T/C agacatggtaatgactggct | 6193 | | |
| UGT2B15 | 12 | (intron 3 1544) | aataaatatataggttatta C/G taatttgctacttttttatt | 6194 | | |
| UGT2B15 | 13 | (intron 3 5550) | gtgtggtgaatcaatgtgtg C/T tgcttgtgggcagtactcca | 6195 | | |
| UGT2B15 | 14 | (intron 3 5720) | ttttttaaaagttaattttt C/A ttggggatttccctgcaggg | 6196 | | |
| UGT2B15 | 15 | (intron 4 134) | atcaaatttaactactttat A/G tttattttccagtcttagta | 6197 | | |
| UGT2B15 | 16 | (intron 5 6627) | ttttaatgttgatatcttta T/C atttatccttcagctataaa | 6198 | | |
| UGT2B15 | 17 | (coding region 1568 (Lys23 | tttccgaaagcttgccaaaa A/C aggaaagaagaagaaaagag | 6199 | | |
| UGT2B15 | 18 | (3′untranslated region 1 | ggatttaatacgtactttag C/T tggaattattctatgtc a/t at | 6200 | | |
| UGT2B15 | 19 | (3′untranslated region 1 | ag c/t tggaattattctatgtc A/T atgatttttaagctatgaaa | 6201 | | |
| UGT2B15 | 20 | (intron 2 1980-1981) | aagagagtagcagaataagg (AGG) acaagggataaatgactagt | 6202 | | |
| UGT2B15 | 20 | (intron 2 1980-1981) | aagagaataacaaaataaga acaaggaataaataactc | 6203 | | |
| UGT2B15 | 21 | (intron 3 605-618) | ctagccaagtagatttagag (A)11-15 cttgtctgctctgctgactt | 6204 | | |
| UGT2B15 | 22 | (3′untranslated region | aagtataatttaaaaaaagc (A)11-14 tacaactcttttttttaaac | 6205 | | |
| | | 1957-1968) | | | | |
| UGT8 | 1 | (coding region 677)Pro226 | gcagaagtacaacctgctgc C/T ggagaagtccatgtatgatt | 6206 | | |
| UGT8 | 2 | (coding region 741)Ala247 | atgctgtgtactgacgtagc A/G ctggaattcccaagacccac | 6207 | | |
| UGT8 | 3 | (intron 2 53-54) | ttgacaatcaataictcctt GT/Δ ttagtgcacaggtcccagta | 6208 | | |
| GSTA1 | 1 | (5′flanking region − 266) | ttgcaaaaagagcaaaatct C/A ggtgaaatgtattgtgtaaa | 6209 | | |
| GSTA1 | 2 | (intron 2 1220) | gagacacaggctttcctaag A/C tatgacaacaccataactag | 6210 | | |
| GSTA1 | 3 | (intron 4 1813) | aaaggcacccactggaggtg A/C attattttgccatcacctga | 6211 | | |
| GSTA1 | 4 | (intron 5 732) | gaagagtgttgtcatgaagg T/C ggagtcactgcccaagggag | 6212 | | |
| GSTA1 | 5 | (intron 6 333) | ttatcccatatgtgcccaca A/G tgagccggtctgagcagagc | 6213 | | |
| GSTA1 | 6 | (3′flanking region 412) | ctttcttatgcatttgcaaa A/C caatgattctgtctgctgtg | 6214 | | |
| GSTA4 | 1 | (intron 1 280) | gcattggtggaaggtgggct C/T ggatcgtccccgggcctggc | 6215 | | |
| GSTA4 | 2 | (intron 3 176) | ggaaatcacttcttattcaa T/C agttccataaaagctggccg | 6216 | | |
| GSTA4 | 3 | (intron 4 94) | acaccacatttactttatgt C/G ttacatagttagtgagatca | 6217 | | |
| GSTA4 | 4 | (intron 5 1062) | cacacttgtgcacatgcaga C/T acccatgggcatccaagagt | 6218 | | |
| GSTA4 | 5 | (coding region 487 | cagatgtgattttactccaa A/G ccattttagctctagaagag | 6219 | | |
| | | (Thr 163 Ala)) | | | | |
| GSTA4 | 6 | (intron 6 595) | tgagctctgagagcaaatga G/A agatgtt a/g gcaccctaaaca | 6220 | | |
| GSTA4 | 7 | (intron 6 630) | taaacatcaccccaaaggat T/A cctaccattctccttctgag | 6221 | | |
| GSTA4 | 8 | (intron 6 3943) | tcttcgtagtatctaatacc T/C tttttgttagccttaaagtt | 6222 | | |
| GSTA4 | 9 | (3′untranslated region 10) | taataacaaccgaatgtcta G/A taaatgactctcctctgagc | 6223 | | |
| GSTA4 | 10 | (intron 5 370-371) | gttgtcgaacagctgtctca (TA) gctgacatcctccctgataa | 6224 | | |
| GSTA4 | 10 | (intron 5 370-371) | gttgtcgaacagctgtctca gctgacatcctccctgataa | 6225 | | |
| GSTM1 | 1 | (5′flanking region − 694) | tacgaagtggctaatttaca C/T agtacttagccagatgaccg | 6226 | | |
| GSTM1 | 2 | (5′flanking region − 661) | gatgaccgaaggactcagta C/T ccgagggcccctaacagaaa | 6227 | | |
| GSTM1 | 3 | (5′flanking region − 658) | gaccgaaggactcagtaccc G/A agggcccctaacagaaaaca | 6228 | | |
| GSTM1 | 4 | (5′flanking region − 656) | ccgaaggactcagtacccga G/A ggcccctaacagaaaacaca | 6229 | | |
| GSTM1 | 5 | (5′flanking region − 537) | tagaggggagactaagccct G/C ggagtagctttcggatcaga | 6230 | | |
| GSTM1 | 6 | (5′flanking region − 525) | taagccctgggagtactgtt C/G ggatcagaggaagtcctgct | 6231 | | |
| GSTM1 | 7 | (5′flanking region − 465) | aattaaattcccaggttggg G/A ccaccactttttagtctgac | 6232 | | |
| GSTM1 | 8 | (5′flanking region − 383) | gcggagcgaaggctgaggga C/T accgcgggcagggaggagaa | 6233 | | |
| GSTM1 | 9 | (5′flanking region − 382) | cggagagaaggctgagggac A/T ccgcgggcagggaggagaag | 6234 | | |
| GSTM1 | 10 | (5′flanking region − 378) | gagaaggctgagggacaccg C/T gggcagggaggagaagggag | 6235 | | |
| GSTM1 | 11 | (5′flanking region − 343) | agggagaagagctttgctcc G/A ttaggatctggctggtgtct | 6236 | | |
| GSTM1 | 12 | (intron 2 118) | tgctggagctgcagctggtc T/C cttccctgagcccgggtgag | 6237 | | |
| GSTM1 | 13 | (intron 3 233) | agtgagtgcccggtctcctc T/C ctgctcttgcttatgggaag | 6238 | | |
| GSTM1 | 14 | (intron 4 26) | tgtgggtggctgcaatgtgt G/A gggggaaggtggcctcctcc | 6239 | | |
| GSTM1 | 15 | (intron 5 140) | actatcagcagttattctca C/T gactccaatgtcatgtcaac | 6240 | | |
| GSTM1 | 16 | (intron 5 577) | ctgccaccccattagaagga A/G ctttctactttccctgagct | 6241 | | |
| GSTM1 | 17 | (intron 5 645) | gctggtctggatccagaggc T/A gccaggtgcttgggcgctcc | 6242 | | |
| GSTM1 | 18 | (coding region 519 | caccgtatatttgagcccaa G/C tgcttggacgccttcccaaa | 6243 | | |
| | | (Asn 173 Lys)) | | | | |
| GSTM1 | 19 | (coding region 528 | tttgagcccaagtgcttgga C/T gccttcccaaatctgaagga | 6244 | | |
| | | (Asp 176 Asp)) | | | | |
| GSTM1 | 20 | (intron 7 2421) | cagcaccgtgtagaatcttc A/G taagtgttagctgttactgt | 6245 | | |
| GSTM1 | 21 | (3′flanking region 42) | atttgctcctggccatctac C/T cagactgtctgtctgtctgt | 6246 | | |
| GSTM2 | 1 | (intron 1 7) | ggaacatccgcggggtgagc C/G agggtccgctgggcggtggg | 6247 | | |
| GSTM2 | 2 | (intron 1 45) | gggacgggggtgcgtggggg C/T ggggaagtgtggagcagctg | 6248 | | |
| GSTM2 | 3 | (intron 3 70) | gactgcatctcctctcccca G/C cttagaggtgttaagatcag | 6249 | | |
| GSTM2 | 4 | (intron 3 224) | agcaggccctggtctcctct T/C tgcccttgcatatgggaagg | 6250 | | |
| GSTM2 | 5 | (intron 5 100) | ttgattccttctggtgagtt C/A ttggtcttgctgactctaag | 6251 | | |
| GSTM2 | 6 | (intron 5 341) | tcctcttggtgggttcatgg T/C ctggctggcttcaggagtga | 6252 | | |
| GSTM2 | 7 | (intron 5 696) | acctttagctagacacagag C/T gctgatttgtgcatttacaa | 6253 | | |
| GSTM2 | 8 | (intron 5 723) | ttgtgcatttacaatccttt A/G gctaggcagaaaagttctcc | 6254 | | |
| GSTM2 | 9 | (3′untranslated region 10 | ctcagccccgagctgtcccc G/A tgttgcatgaaggagcagca | 6255 | | |
| GSTM2 | 10 | (3′flanking region 139) | ttctgctgggcatagtaagg C/T gcttgagaattcttgctccc | 6256 | | |
| GSTZ1 | 1 | (5′flanking region − 546) | agcagggcccaccagccgac C/A gcctcgaagcgccgtgagcc | 6257 | | |
| GSTM2 | 2 | (5′flanking region − 321) | tgtctgaccagccgccccgc T/C aaggagtcacaagagggcag | 6258 | | |
| GSTM2 | 3 | (intron 1 2890) | aaaatactgcatcaaaacca G/A gccacgctctgttgggggga | 6259 | | |
| GSTM2 | 4 | (intron 1 2896) | ctgcatcaaaaccaggccac G/A ctctgttggggggacaccaa | 6260 | | |
| GSTM2 | 5 | (intron 2 255) | tctcccaacactgctctcca A/G agccccttggcaaccatgtt | 6261 | | |
| GSTM2 | 6 | (intron 2 1560) | caccactgtttaaggccgtg G/C gggggcagagttaaacacaa | 6262 | | |
| GSTM2 | 7 | (coding region 94 (Lys 32 | ccttgaaaggcatcgactac G/A agacggtgcccatcaatctc | 6263 | | |
| GSTM2 | 8 | (intron 4 297) | agaaggaggagtttgctggc C/T ctgtcccctctggtccaggg | 6264 | | |
| GSTM2 | 9 | (intron 6 94) | tatctgaaccagccctccag G/A ctgctttgggcctgacagtt | 6265 | | |
| GSTPi | 1 | (intron 1 269) | ctcccccgggctccagcaaa C/G ttttctttgttcgctgcagt | 6266 | | |
| GSTPi | 2 | (intron 2 134) | ccccgggcctccttcgtgtt C/T cccgcctctcccgccatgcc | 6267 | | |
| GSTPi | 3 | (intron 5 438) | gtgtgtgcgcgtgcgtgtgc G/A tgtgtgtgcgtgtgtgtgtg | 6268 | | |
| GSTPi | 4 | (intron 6 162) | cccgctggctgagtccctag C/T ccccctgccctgcagatctc | 6269 | | |
| GSTT1 | 5 | (5′flanking region − 103) | taaagagtgtcccaggcgtc C/T gtgcagcccaatggggcaca | 6270 | | |
| MGST1 | 1 | (promoter region − 1879) | ttaataaatgtttattcaat T/G aaaccaactgctaatattct | 6271 | | |
| MGST1 | 2 | (promoter region − 508) | tctggaccctgaacaggagg G/C gacatcgtgacaaagcaaat | 6272 | | |
| MGST1 | 3 | (promoter region − 314) | cctggagattttaactttct G/A cgaagtttttaaaaacaact | 6273 | | |
| MGST1 | 4 | (promoter region − 131) | atcagcaggcgatccttact G/C tgggcgggtaaatcaggtga | 6274 | | |
| MGST1 | 5 | (intron 1b 36) | ggagaaggggaccgcatgca A/G agggtggcaggcagggaggg | 6275 | | |
| MGST1 | 6 | (intron 1c 456) | ccccttgggacggttctcac C/T tgtgccccacttccccagtc | 6276 | | |
| MGST1 | 7 | (intron 1c 719) | gcccgcaagcattgctgtat A/G gcacccaggcctccagtgag | 6277 | | |
| MGST1 | 8 | (intron 1c 985) | cgagtaaaatttttctaccg C/G tttgttttagagtggtgtct | 6278 | | |
| MGST1 | 9 | (intron 1c 1428) | gtaaagggaaagggcgttcc T/A caactgagaagtgaagattc | 6279 | | |
| MGST1 | 10 | (intron 1c 2914) | ctcatcaggtgtgtgtcgga T/G gcttggtgctggccagtctc | 6280 | | |
| MGST1 | 11 | (intron 1c 4274) | attgtaatagattatcaaag G/T tgatgaaagtagtgtacata | 6281 | | |
| MGST1 | 12 | (intron 1c 4276) | tgtaattgattaacaaaggt G/T atgaaagtagtgtacataat | 6282 | | |
| MGST1 | 13 | (intron 1c 4767) | gccttcatcttcagcacatt C/T ccaattatacttccaattcc | 6283 | | |
| MGST1 | 14 | (intron 2 2379) | ttctcaaatttcattataca G/C tattcttcaacccaaagttt | 6284 | | |
| MGST1 | 15 | (intron 2 2767) | tttaactatagatgccttct T/G ctcctcttgtgtttgattta | 6285 | | |
| MGST1 | 16 | (intron 2 2974) | tcactgcagcctcaacctct C/T gggctcaggtgatcctccaa | 6286 | | |
| MGST1 | 17 | (intron 2 3083) | aaaaaatttgtagatatggg T/G actccctatgttgcccaggc | 6287 | | |
| MGST1 | 18 | (intron 2 3106) | tccctatgttgcccaggctg A/G tcttgaattcttgggctcaa | 6288 | | |
| MGST1 | 19 | (intron 3 1495) | gtcagacaatggccttcagc G/A tcctctctttgcagaatatg | 6289 | | |
| MGST1 | 20 | (intron 3 1703) | ttctcttctaagaagaagtc T/C gtgcagatacttagcacaaa | 6290 | | |
| MGST1 | 21 | (intron 3 2528) | ttttggagacacttttcaga G/C agagcgtttccagcatcttc | 6291 | | |
| MGST1 | 22 | (intron 3 2557) | tccagcatcttccctttcca T/C ttttaagttagacttttttt | 6292 | | |
| MGST1 | 23 | (intron 3 2731) | atacacatatggaacaatta A/C ctaaaaacttaaggtaatat | 6293 | | |
| MGST1 | 24 | (intron 3 3032) | agagacatttagaatatatt C/A cctttaaaggtagagaataa | 6294 | | |
| MGST1 | 25 | (intron 3 3045) | atatattccctttaaaggta G/C agaataacccttcactgaga | 6295 | | |
| MGST1 | 26 | (intron 3 3289) | ggtttatagtgttccccccc T/A ccgggcccccaaaagaccca | 6296 | | |
| MGST1 | 27 | (intron 3 3976) | ggaaagctggggaactgttt G/T cctggaacagagtctcaaaa | 6297 | | |
| MGST1 | 28 | (intron 3 4288) | ccattctatttgtcaactgc G/A taacacaggcgtagaagtgg | 6298 | | |
| MGST1 | 29 | (intron 3 4298) | tgtcaactgcgtaacacagg C/T gtagaagtggacattgtttt | 6299 | | |
| MGST1 | 30 | (intron 3 4429) | attggaggtgacgatatctc T/C gtgatgctgggggagaaatc | 6300 | | |
| MGST1 | 31 | (intron 3 4519) | tttaatagaaaatggtattc C/T tgtcttttctttcccatctc | 6301 | | |
| MGST1 | 32 | (intron 3 4817) | attgctatagaagagagtaa C/T gtaaagcagaaatagttttc | 6302 | | |
| MGST1 | 33 | (intron 3 6077) | tttgaaattagtgtctttaa T/C agttatctttttccacagag | 6303 | | |
| MGST1 | 34 | (3′untranslated region 60 | gggtaaacccattttgaata T/C tagcattgccaatatcctgt | 6304 | | |
| MGST1 | 35 | (3′flanking region 147) | tatttgctttccttctctct C/T tgttttctttttctctgaaa | 6305 | | |
| MGST1 | 36 | (3′flanking region 237) | cagcacgtttttcctatgaa C/T aagacattctccaaataact | 6306 | | |
| MGST1 | 37 | (intron 1c 904-923) | tgcgattatctttggtaatt (A)16-19 ggcaaatcagtccaaatttg | 6307 | | |
| MGST1 | 38 | (intron 1c 3433-3434) | ccccttcaatactagaacaa (AA) gcagacacattaaatgttac | 6308 | | |
| MGST1 | 38 | (intron 1c 3433-3434) | ccccttcaatactagaacaa gcagacacattaaatgttac | 6309 | | |
| MGST1 | 39 | (intron 1c 5146) | actatttcaatttttttttt T/Δ ggagggggagacagagtctc | 6310 | | |
| MGST1 | 40 | (intron 2 552-563) | cccagcattataagaatgac (T)10-12 aagtgcagatgtggggaggg | 6311 | | |
| MGST1 | 41 | (exon 3 172-173) | tagcatttggcaaaggagaa AA/Δ tgccaagaagtatcttcgaa | 6312 | | |
| MGST1 | 42 | (intron 3 152-158) | agaaaactggatgtctgaaa TTGACA/Δ(GTCCAATAT) | 6313 | | |
| | | | cactgcacttgtatgtgttg | | | |
| MGST1 | 43 | (intron 3 2198-2200) | ggattttagattcctcccta CTA/Δ ttctttccgaccttccaccc | 6314 | | |
| MGST1 | 44 | (intron 3 2567-2568) | ccctttccatttttaagtta (A) gacttttttttttcacctct | 6315 | | |
| MGST1 | 44 | (intron 3 2567-2568) | ccctttccatttttaagtta gacttttttttttcacctct | 6316 | | |
| MGST1 | 45 | (intron 3 2571-2580) | tttccatttttaagttagac (T)9-11 cacctctctcgttacttcag | 6317 | | |
| MGST1 | 46 | (intron 3 3288-3289) | ggtttatagtgttccccccc (C) tccccgcccccaaaagaccc | 6318 | | |
| MGST1 | 46 | (intron 3 3288-3289) | ggtttatagtgttccccccc tccccgcccccaaaagaccc | 6319 | | |
| MGST1 | 47 | (intron 3 4682-4683) | tcctcttcatgtctctatgt (GAGATGTTGTGGCTCACAT) | 6320 | | |
| | | | tcctcttcatgtctctatgt | | 6321 | |
| MGST1 | 47 | (intron 4682-4683) | agtcatcctctttgtgagac | | | |
| MGST1 | 48 | (3′flanking region 1359-1 | acacacacacacacacacac CC/Δ tgctctggagttgggcaact | 6322 | | |
| MGST1 | 49 | (3′flanking region 1899-1 | ttagaatagtttctaactat ACT/Δ tttactcccaagagaagctt | 6323 | | |
| MGST1L1 | 1 | (5′flanking region − 105) | tgctgccgctgccgtggggc G/A gggcgtgggcggtgctggct | 6324 | | |
| MGST1L1 | 2 | (intron 1 277) | agtgtctgtgagagaagcag G/A ttctggagggtggagtgtgg | 6325 | | |
| MGST1L1 | 3 | (intron 2 8030) | ggggttatacagagcccctc C/G gcccccaccacacatatgca | 6326 | | |
| MGST1L1 | 4 | (intron 2 8499) | gtatggcaggagtggggtcc C/T ggcaagccatagaggtatgg | 6327 | | |
| MGST1L1 | 5 | (3′untranslated region 46 | cgccacctgtgaccagcagc T/G gatgcctccttggccaccag | 6328 | | |
| MGST2 | 1 | (5′flanking region − 46) | ggtcagcattcaaagtcaag A/T agcgccatttatcttcccgt | 6329 | | |
| MGST2 | 2 | (intron 1 176) | ggtcacccatgccgcctgct A/C ccctccttcccaggggcaag | 6330 | | |
| MGST2 | 3 | (intron 1 204) | tcccaggggcaagcagagac T/C gagaacattccagagattag | 6331 | | |
| MGST2 | 4 | (intron 1 373) | ttacaagtgttccaaaggaa A/T cgtgcctgcttctaaacctg | 6332 | | |
| MGST2 | 5 | (intron 2 − 3245) | cctcgtgatttgcccacctc G/A gcctcccaaagtgctgggat | 6333 | | |
| MGST2 | 6 | (intron 2 − 1998) | aggccgaggtgggcggatca T/C gaggtcaggagatcgagacc | 6334 | | |
| MGST2 | 7 | (intron 2 − 1640) | tgtttattccttgcatagcc A/G taatataaagtatgaatttt | 6335 | | |
| MGST2 | 8 | (intron 3 41) | actgtgttctaatgatgact A/G tgatgcttaaacgattaagg | 6336 | | |
| MGST2 | 9 | (intron 3 453) | atcagagtgctatgttgcag A/G tatatgaactttggcttcat | 6337 | | |
| MGST3 | 1 | (5′flanking region − 520) | acaaaaaggccctaacagcg A/C taaatccattcacttcggga | 6338 | | |
| MGST3 | 2 | (5′flanking region − 355) | cgcctaaaaccgctacggtg G/A ctctgctggggacaaattat | 6339 | | |
| MGST3 | 3 | (5′flanking region − 234) | ctgggggagtagatatatgt T/A tttgagaatgagaggagtaa | 6340 | | |
| MGST3 | 4 | (intron 1 74) | agcctttgcgcaggcacctc C/T atatttcagcctatgcgagc | 6341 | | |
| MGST3 | 5 | (intron 1 682) | agaaaatgccccttctttat G/C tggggtggcagcacggagcc | 6342 | | |
| MGST3 | 6 | (intron 1 832) | cgagtttacaagctacataa T/C agcgtcgggggcaagtaagt | 6343 | | |
| MGST3 | 7 | (intron 1 1919) | aataaaattcctgagtttct G/C tcactcgctcttacagtacc | 6344 | | |
| MGST3 | 8 | (intron 1 1991) | tgtaattaggcaacaggaaa A/G ttgtactatctttcaaatgc | 6345 | | |
| MGST3 | 9 | (intron 1 4458) | tcttccatcctcctaacata T/C agttagcttccactctccaa | 6346 | | |
| MGST3 | 10 | (intron 1 4676) | tgaatatgcaatgcaattgt C/G gggggatagttacttttcat | 6347 | | |
| MGST3 | 11 | (intron 3 278) | cagcataacccatctaaacc G/C atgttgactctcccacccct | 6348 | | |
| MGST3 | 12 | (intron 4 423) | cttgcctttttgttgtgggg T/G gtggggtggtcacagaaaag | 6349 | | |
| MGST3 | 13 | (intron 4 506) | gtgcagagaagaaaacaaag T/C ggggaaggtggaaaggggat | 6350 | | |
| MGST3 | 14 | (intron 4 − 162) | tcacagatattttattttcc C/T gactgaaactaacttaattc | 6351 | | |
| MGST3 | 15 | (intron 4 − 130) | acttaattctacctaatttg C/G gtggggagtagttggccaaa | 6352 | | |
| MGST3 | 16 | (intron 4 − 105) | ggagtagitggccaaatcat C/G aaattgttaactttttgcta | 6353 | | |
| MGST3 | 17 | (intron 4 − 65) | aacatattgtgtaatcaacc C/T taggtgttaaaaaaggtttg | 6354 | | |
| MGST3 | 18 | (intron 5 105) | atcccagcactttgggaggc G/C aaggcaggcagattgcttga | 6355 | | |
| MGST3 | 19 | (intron 5 197) | aaaaaatacaaaaattagcc G/A gatgtggtagtgcacacctg | 6356 | | |
| MGST3 | 20 | (intron 5 222) | tggtggtgcacacctgtagt C/T ccagctacttgggaggctga | 6357 | | |
| MGST3 | 21 | (intron 5 374) | cttatgctactatatttttt T/C ttcttgggaatttgagaaaa | 6358 | | |
| MGST3 | 22 | (3′untranslated region 51 | atgacttacctttatttcca G/T ttacattttttttctaaata | 6359 | | |
| MGST3 | 23 | (3′flanking region 166) | agtctgattgtggtgatgta G/T gtatagtcatgccacagtga | 6360 | | |
| SULT1A1/ST | 1 | (5′flanking region − 1597) | gcagagtaaagggactcact C/G aagaagaggaacgtgggggt | 6361 | | |
| SULT1A1/ST | 2 | (5′flanking region − 1491) | gagaggtatattcatgaaga G/T tccaggaaaaggtaaagatt | 6362 | | |
| SULT1A1/ST | 3 | (5′flanking region − 1376) | cggtttcatatgttactgat C/T a/a taca a/g tgaaatcctaagt | 6363 | | |
| SULT1A1/ST | 4 | (5′flanking region − 1375) | ggtttcatatgttactgat c/t A/G taca a/g tgagatcctagctc | 6364 | | |
| SULT1A1/ST | 5 | (5′flanking region − 1370) | catatgttactgat c/t a/g taca A/G taagatcctaggtaaaac | 6365 | | |
| SULT1A1/ST | 6 | (exon 1B − 65) | aaccctgcattccccacaca G/A cacccacaatcagccactgc | 6366 | | |
| SULT1A1/ST | 7 | (intron 1B 442) | gagccaccctgcctaggcct G/A tgcttttgctgagtcatcag | 6367 | | |
| SULT1A1/ST | 8 | (exon 1A − 197) | gctgggggtcccagcaggaa A/G tggtgagacaaagggcgctg | 6368 | | |
| SULT1A1/ST | 9 | (exon 1A − 159) | ctggctggcagggagacagc A/C caggaaggtcctagagcttc | 6369 | | |
| SULT1A1/ST | 10 | (exon 1A − 95) | gagaccttcacacaccctga T/C atctgggccttgcccgacga | 6370 | | |
| SULT1A1/ST | 11 | (intron 1A 60) | ctggttttcagccccagccc C/T gccactga c/g tggctttgtga 6371 | | | |
| SULT1A1/ST | 12 | (intron 1A 69) | agccccagccc c/t gccactga C/G tggctttgtgagtgcgggca 6372 | | | |
| SULT1A1/ST | 13 | (intron 1A 174) | tgtgatggtggtaagggaac G/A ggcctggctctggcccctga | 6373 | | |
| SULT1A1/ST | 14 | (intron 6 11) | catgaaggaggtgagaccac C/G igtga a/t gcttccctccatgt 6374 | | | |
| SULT1A1/ST | 15 | (intron 6 17) | ggaggtgagaccac c/g tgtga A/T gcttccctccatgtgacacc 6375 | | | |
| SULT1A1/ST | 16 | (intron 6 35) | gaagcttccctccatgtgac A/T cctgggggccggcacctcac | 6376 | | |
| SULT1A1/ST | 17 | (intron 6 71) | ctcacagggacccaccaggg T/C cacccagccccctcccttgg | 6377 | | |
| SULT1A1/ST | 18 | (intron 6 100) | ttggcagcccccacagcagg C/A cc g/a gattccccatcctgcct 6378 | | | |
| SULT1A1/ST | 19 | (intron 6 111) | gcagcccccacagcagg c/a cc G/A gattccccatcctgccttct 6379 | | | |
| SULT1A1/ST | 20 | (intron 6 270) | ctccctgccaaaaggtgtgc C/T acccagggccacagtcatgg | 6380 | | |
| SULT1A1/ST | 21 | (intron 6 488) | ttttacttttcctgaatcag C/T aatccgagcctccactaagg | 6381 | | |
| SULT1A1/ST | 22 | (intron 6 509) | aatccgagcctccactgagg A/G gccctctgctgctcagaacc | 6382 | | |
| SULT1A1/ST | 23 | (coding region 600 | ccctctgctgctcaaaaccc C/G aaaagggagattcaaaagat | 6383 | | |
| | | (Pro 201 Pro)) | | | | |
| SULT1A1/ST | 24 | (coding region 638 | gatcctggagtttgtgggac A/G ctccctgccagaggagaccg | 6384 | | |
| | | (His 213 Arg)) | | | | |
| SULT1A1/ST | 25 | (coding region 645 | gagtttgtggggcactccct G/A ccagaggaaaccgtggactt | 6385 | | |
| | | (Leu 215 Leu)) | | | | |
| SULT1A1/ST | 26 | (coding region 902 | gctgtgagaggagctcctgg G/A gtcactgcagagggagtgtg | 6386 | | |
| | | (Gly 301 Ser)) | | | | |
| SULT1A1/ST | 27 | (coding region 973 | taaaatatgaattgagggcc T/C gggacggtaggtcatgtctg | 6387 | | |
| | | (Trp 325 Arg)) | | | | |
| SULT1A2/ST | 1 | (5′flanking region − 547) | tgttctttcttggttctatg G/C atccatgctctgctccaccc | 6388 | | |
| SULT1A2/ST | 2 | (5′flanking region − 425) | tgtgggttgcactgggccag G/A acccctggcaccttcaaaac | 6389 | | |
| SULT1A2/ST | 3 | (5′flanking region − 358) | ctttccagggcctgcctatc C/T ca g/t ctttctcctccaatccc | 6390 | | |
| SULT1A2/ST | 4 | (5′flanking region − 355) | tccagggcctgcctatc c/t ca G/T ctttctcctccaatccctcc | 6391 | | |
| SULT1A2/ST | 5 | (5′untranslated region − | actgcgggcgaggagggcac A/G aggccaggttcccaagaact | 6392 | | |
| SULT1A2/ST | 6 | (intron 1A 85) | ctgactggccttgtgagtgc G/A ggcaagtcactcagcctccc | 6393 | | |
| SULT1A2/ST | 7 | (coding region 20 | catggagctgatccaggcca T/C ctc t/c cgcccgccactggagt | 6394 | | |
| SULT1A2/ST | 8 | (coding region 24 (Ser 8 S | gagctgatccaggaca t/c ctc T/C cgcccgccactggagtacgt | 6395 | | |
| SULT1A2/ST | 9 | (intron 2 34) | gccacccaccctctcccagg T/C ggcagtccccaccttggcca | 6396 | | |
| SULT1A2/ST | 10 | (intron 5 77) | cagcaaccctgtgtcggcac T/C ccctgcccacttctccagtg | 6397 | | |
| SULT1A2/ST | 11 | (intron 6 684) | actggggtcccaggggtcga G/C gagctggctctatgggtttt | 6398 | | |
| SULT1A2/ST | 12 | (coding region 704 | gttcaaggagatgaagaaga A/C ccctatgaccaactacacca | 6399 | | |
| | | (Asn 235 Thr)) | | | | |
| SULT1A2/ST | 13 | (3′untranslated region 89 | gctctgagctgtgagagggg T/C tcctggagtcactgcagacc | 6400 | | |
| SULT1A2/ST | 14 | (3′flanking region 98) | cctccccgctccagctcctc A/T acttgccctgtttggagagg | 6401 | | |
| SULT1A2/ST | 15 | (3′flanking region 817) | ccactgactcccggcttgcc A/C aggctgccagggctggcaaa | 6402 | | |
| SULT1A2/ST | 16 | (3′flanking region 1006) | cctctcccctggaggctgct T/C tacccgctgtgggggcgcat | 6403 | | |
| SULT1A2/ST | 17 | (3′flanking region 1464) | tcccgtagcccaggcaagtt C/T ggtgaccagagagcagcccc | 6404 | | |
| SULT1A2/ST | 18 | (intron 4 1728) | tcagcttcctcctttgccaa A/Δ cccagagatgagctggccta | 6405 | | |
| SULT1A3/ST | 1 | (coding region 843 | cgcttcgatgcggactatgc G/A gagaagatggcagactgcag | 6406 | | |
| | | (Ala 281 Ala)) | | | | |
| SULT1C1 | 1 | (intron 3 2280) | gcaaatttttggtattttta G/T tacagtcagggttttaccat | 6407 | | |
| SULT1C1 | 2 | (intron 3 3742) | gcagatctcactttctggca G/A attccctgaatttgctcccc | 6408 | | |
| SULT1C1 | 3 | (intron 3 4453) | ttcatagggcttttccctca C/T ttgttttgtaattttgtata | 6409 | | |
| SULT1C1 | 4 | (intron 3 5234) | gaaaagcgactagaggcagg A/G gagctttgcagttcttctaa | 6410 | | |
| SULT1C1 | 5 | (intron 3 6175) | tggctggcaggaaggtgagg G/C agtcctctcttctctggtcc | 6411 | | |
| SULT1C1 | 6 | (intron 4 205) | acatgaaggcaggatccaga T/C tgaatgtttggagggaacta | 6412 | | |
| SULT1C1 | 7 | (intron 4 408) | ggctcacgcctgtaatccca G/C cactttgggaggccgaggcg | 6413 | | |
| SULT1C1 | 8 | (intron 4 429) | cactttgggaggccgaggcg G/C gtggatcacaaagtcaggag | 6414 | | |
| SULT1C1 | 9 | (intron 3 2106-2115) | tgcagtggtcgtttgtttgg (T)8-11 gagacaaagtgtggctgtgt | 6415 | | |
| SULT1C1 | 10 | (intron'4195-4210) | atgcccagctaattttggta (T)10-13 agagacaggatttcaccatg | 6416 | | |
| SULT1C2 | 1 | (5′flanking region − 110) | tcctgttaactcacagagaa C/T ggaagggctggaacgggacc | 6417 | | |
| SULT1C2 | 2 | (coding region 15 (Asp 5 G | acactaatggccttacacaa C/G atggaggattttacatttga | 6418 | | |
| SULT1C2 | 3 | (intron 1 297) | gtagacttgtttatttattc A/C ttcccaatctaggcccttat | 6419 | | |
| SULT1C2 | 4 | (intron 1 363) | gagtgtgtgagctagacagg T/G gatcctgagtctgatttggg | 6420 | | |
| SULT1C2 | 5 | (intron 1 2300) | gggctactatgagcagccac C/T acctcaggaaggatgacttc | 6421 | | |
| SULT1C2 | 6 | (intron 2 455) | aagacttggaagcaaataga T/G aaaaaaaaaatcgtagaaat | 6422 | | |
| SULT1C2 | 7 | (intron 4 55) | caaaatctccaaacaggcta G/A aaggaaagaatcttttcttt | 6423 | | |
| SULT1C2 | 8 | (intron 4 111) | ctgccttctttaatggaaca T/C tctcacttctcttcaggaat | 6424 | | |
| SULT1C2 | 9 | (intron 5 1657) | ctttgtgtttactttgtttt T/C acttggtacaaaagtgttgt | 6425 | | |
| SULT1C2 | 10 | (intron 5 2082) | tctgctcctagagatggagg c/A gtcccacagccacagtgatg | 6426 | | |
| SULT1C2 | 11 | (intron 6 933) | agctagtgaacccctcccac A/G taactgtatttcaggggcag | 6427 | | |
| SULT2A1 | 1 | (intron 2 478) | ggactggctgctgtacacac T/C tcgtcttactgtgtgtaaat | 6428 | | |
| SULT2A1 | 2 | (intron 3 382) | caaaaccctcttaatattct G/A tttctatctgtctcagaact | 6429 | | |
| SULT2A1 | 3 | (intron 3 409) | tctgtctcagaactgattgc A/G tgactctaggatcgctatat | 6430 | | |
| SULT2A1 | 4 | (intron 5 249) | agctggaaattacaggcaca C/T gccaccacacccagctaatt | 6431 | | |
| SULT2A1 | 5 | (intron 5 395) | aggcatgagccagggcgccg G/A gccaatttatcaactttaat | 6432 | | |
| SULT2A1 | 6 | (3′flanking region 33) | ttccttgttaaaagtcacca G/C ggttggccaggc a/g cggtggt | 6433 | | |
| SULT2A1 | 7 | (3′flanking region 46) | gctacca g/c ggttggccaggc A/G cagtggttcaggcccccaac | 6434 | | |
| SULT2A1 | 8 | (3′flanking region 199) | ttagccaggcgcattggctc A/G tgtctgtaatcccagcactt | 6435 | | |
| SULT2B1 | 1 | (intron 2 4162) | ctctccccgcggcctaccat C/T cgcacacaggtgatctacat | 6436 | | |
| SULT2B1 | 2 | (intron 3 879) | gagggcatccagctctgggg G/A ctggacctgggggtttgtgg | 6437 | | |
| SULT2B1 | 3 | (intron 4 3882) | ttccacgctccttccggggc C/T gagcgccccccccccgccga | 6438 | | |
| SULT2B1 | 4 | (intron 5 1780) | cctgcagaagggggtccctt C/T catgtccaaacagtaatggc | 6439 | | |
| SULT2B1 | 5 | (intron 5 1814) | taatggctgcagcatggagc G/A gtgtggaggcattgagacag | 6440 | | |
| SULT2B1 | 6 | (coding region 789 | ccctcttctccaggggtctg C/T ggcgagtggaagaaccactt | 6441 | | |
| | | (cys 263 cys)) | | | | |
| SULTX3 | 1 | (intron 1 332) | cctgcttctccctttacctg G/T ctgactgtatgaccttggac | 6442 | | |
| SULTX3 | 2 | (intron 1 1167) | caggaatggctaagcgtatc G/A ttggcttctgtggccactca | 6443 | | |
| SULTX3 | 3 | (intron 1 2872) | cattctcactgatgcagagg G/A aagcttctgggcctgggcgt | 6444 | | |
| SULTX3 | 4 | (intron 1 6242) | cacccttggcttttaccagc A/G tggaaacattttacctgaat | 6445 | | |
| SULTX3 | 5 | (intron 1 6601) | gcgtgggcttctggagggag C/T gagaggagagtggagggcgg | 6446 | | |
| SULTX3 | 8 | (intron 1 6768) | agcttgaaatgagccagact C/T ccctgggacctgttgacccc | 6447 | | |
| SULTX3 | 7 | (intron 1 6905) | agtactttgttttatcctcc C/T catcctcacaactttgccat | 6448 | | |
| SULTX3 | 8 | (intron 1 7464) | gccaggatcccttgagagac G/A acatgaacacagccaggagc | 6449 | | |
| SULTX3 | 9 | (intron 1 7833) | tgcttcgggctgggcttggc G/A ggggcagctgtgctccaggc | 6450 | | |
| SULTX3 | 10 | (intron 1 8189) | caaactggggcccttaatgc C/T gcacaccagagcctcctttc | 6451 | | |
| SULTX3 | 11 | (intron 1 8316) | ctctcacacaagggcggagc C/G ccttccccttgaggcagagc | 6452 | | |
| SULTX3 | 12 | (intron 1 8617) | agacagaggctggggccaag C/T cagggttgccggagcttccc | 6453 | | |
| SULTX3 | 13 | (intron 1 8631) | gccaagccagggttgccgga G/T cttcctggactggtcaggcc | 6454 | | |
| SULTX3 | 14 | (intron 1 9493) | ccccccccccagagcggccc G/A ccgtgctctgtgtcgagggc | 6455 | | |
| SULTX3 | 15 | (intron 1 10306) | caggcggggagcctgaatgc C/T gcagtcgtgagggtggccag | 6456 | | |
| SULTX3 | 16 | (intron 1 11987) | ccataaaataatgatatcag T/C acactttttggaaatttgag | 6457 | | |
| SULTX3 | 17 | (intron 1 13085) | ctctgtgcccggtgttgaga C/A aggccatgccctagagtcct | 6458 | | |
| SULTX3 | 18 | (intron 1 13108) | gccatgccctagagtcctgg G/A gagttccaccccagaacagc | 6459 | | |
| SULTX3 | 19 | (intron 2 700) | gaaccatctgggagtcgttc C/T gtactgccgtgccgagggcc | 6460 | | |
| SULTX3 | 20 | (intron 2 818) | agccatagtagctagccagc G/A atcagcgctgggaggggagc | 6461 | | |
| SULTX3 | 21 | (intron 2 1677) | accccacggccccggaaccc C/T accccttccttcctcctctg | 6462 | | |
| SULTX3 | 22 | (intron 4 4954) | gcgtgccgaaggcgggaggg C/T cgggatggctcaagaggtga | 6463 | | |
| SULTX3 | 23 | (intron 5 3632) | ccagcggacccccacaccag C/T ggtcagagaacattgtcttt | 6464 | | |
| SULTX3 | 24 | (intron 5 3662) | acaccgccggccaaggccgc C/T gaagtgctgcaataaagaaa | 6465 | | |
| SULTX3 | 25 | (intron 6 1874) | cctgatctcagagagctgac A/G atggaaagaattctaaacga | 6466 | | |
| SULTX3 | 26 | (intron 6 2133) | agaccggtgcctgcagttta T/G cccacagctcagcccgccct | 6467 | | |
| SULTX3 | 27 | (intron 6 2524) | ggaagggccagggctgcctg T/C gatgcccagagcagtgcact | 6468 | | |
| SULTX3 | 28 | (intron 6 2573) | agatcatactcgctcctggg A/G cgcccaccaaacaccggcca | 6469 | | |
| SULTX3 | 29 | (3′flanking region 12) | gttcccggcgttgcgtcgag C/G gtttctgcttgtgggggtag | 6470 | | |
| SULTX3 | 30 | (3′flanking region 445) | tccaaagcctgtcttcctga T/G ttcctgtggaaggagagtcc | 6471 | | |
| SULTX3 | 31 | (intron 1 6418) | ctctccctgttagtgtgggg G/Δ cagctctttccagtgtcctg | 6472 | | |
| SULTX3 | 32 | (intron 5 2458) | cccttaaagggaagttcatc C/Δ ttctctgccttccaggctcc | 6473 | | |
| TPST1 | 1 | (5′flanking region − 298) | acccgccaccatgnccagct A/C attttttttgtatttttttt | 6474 | | |
| TPST1 | 2 | (intron 1 3520) | agaaaagcagattaatgtaa C/G agtgacgcttagacaacaag | 6475 | | |
| TPST1 | 3 | (intron 1 3610) | ggcagaaagagaatatagca A/G ctattaaacacaaataaatt | 6476 | | |
| TPST1 | 4 | (intron 1 20820) | tattgctgtccacctggtca A/G tgtgtcctctggataagtgc | 6477 | | |
| TPST1 | 5 | (intron 1 − 6761) | aatacaatacttattctgta T/C aattctagagggcccagaga | 6478 | | |
| TPST1 | 6 | (intron 1 − 544) | tagaacaagtgaatatttta C/T gttcttagtggtttatggtt | 6479 | | |
| TPS71 | 7 | (intron 1 − 526) | tacgttcttagtggtttatg G/T ttggcagttttcccccaaca | 6480 | | |
| TPST1 | 8 | (intron 1 − 234) | tcaagacatttaataatgca C/T acgtttcagccaaccctttt | 6481 | | |
| TPST1 | 9 | (intron 1 − 48) | ttatagtgggtttaagcatg A/G tttctaaaaaatttaaataa | 6482 | | |
| TPST1 | 10 | (intron 2 − 18944) | aaaacattagaactgggaag G/A ttaaaaaatctttagtcttt | 6483 | | |
| TPST1 | 11 | (intron 2 − 18687) | tctgtgcaccctaataacat A/G tttccttaaaactagtacta | 6484 | | |
| TPST1 | 12 | (intron 2 − 18501) | ttggaaggtaacttaatgta A/G gtgcctgaaaaacagggata | 6485 | | |
| TPST1 | 13 | (intron 2 − 159) | gaatggggatttccctcagt C/G ctgcccactggctgctcttg | 6486 | | |
| TPST1 | 14 | (intron 2 − 19) | acctgttgccttaaactcac G/A cctgctttgtttttccaggt | 6487 | | |
| TPST1 | 15 | (intron 3 158) | cgctggggaagaaagatcag C/G gtctgggacttgttgatttt | 6488 | | |
| TPST1 | 16 | (intron 3 3779) | agcagggcacgtcaccctcc C/T ggcacacccatgtgttcacc | 6489 | | |
| TPST1 | 17 | (intron 4 292) | ttgttattttcattatgaac C/T atgaaatatttaagctggaa | 6490 | | |
| TPST1 | 18 | (3′untranslated region 15 | gttgtctgtacatgttctaa T/G gttttgtagaacacgtgtgc | 6491 | | |
| TPST1 | 19 | (3′flanking region 264) | acggtgcttggcctgcatta C/T cattttgtagtgaagtttct | 6492 | | |
| TPST2 | 1 | (intron 2 578) | tcacctatcatcctcactgc G/A aggatgccaggatacctccc | 6493 | | |
| TPST2 | 2 | (intron 2 789) | cttaagccatcgtgcaggtc A/G ttgctgtcttctgctcactt | 6494 | | |
| TPST2 | 3 | (intron 3 2009) | cccaggctggagtgtagtgg T/C gtgatct c/t ggctcactgcaa | 6495 | | |
| TPST2 | 4 | (intron 3 2017) | ggagtgtagtgg t/c gtgatct C/T ggctcactgcaacctccgcc | 6496 | | |
| TPST2 | 5 | (intron 3 2035) | ctcggctcactgcaacctcc G/A cctcccgggttcaagcagtt | 6497 | | |
| TPST2 | 6 | (intron 4 104) | aatgttcagtctctcaattc C/T tggtcgtctgatttgttcct | 6498 | | |
| TPST2 | 7 | (intron 4 379) | taaataaataaactattggt C/T cctttcttgtcttataaggt | 6499 | | |
| TPST2 | 8 | (intron 4 588) | tacagcagcctgatacttct C/T ggcttgagccatcctctcac | 6500 | | |
| TPST2 | 9 | (intron 4 626) | caccccaggctcctgagtag C/T taggactgcaggtgcacgcc | 6501 | | |
| TPST2 | 10 | (intron 4 718) | cccaggctggtctagaactc C/G tggccgtaagggatgcccct | 6502 | | |
| TPST2 | 11 | (intron 4 873) | gttgatggccttatttatac G/A tttccattacagcttctagt | 6503 | | |
| TPST2 | 12 | (intron 4 949) | caaatatttgaaaatgggac C/G caggcccgaggaagagcttt | 6504 | | |
| TPST2 | 13 | (intron 4 1033) | taagctcagcatttctgagc G/A tgtgctgattttaggaaata | 6505 | | |
| TPST2 | 14 | (intron 4 1051) | gcgtgtgctgattttaggaa A/G taaacagttatcgtattgaa | 6506 | | |
| TPST2 | 15 | (intron 4 1356) | gattcaacgtacataccagc C/T gacattgacaggtggatggc | 6507 | | |
| TPST2 | 16 | (intron 4 1707) | gtctccttaaaaggtggctc G/T ctgcccctggctcgccccag | 6508 | | |
| TPST2 | 17 | (intron 5 215) | aagaccagcctgaccaaaac G/A gtgaaaccccgtctctacta | 6509 | | |
| TPST2 | 18 | (intron 5 341) | tgggaggcagaggtcgcagt G/A agctgagatcgcgccgttgc | 6510 | | |
| TPST2 | 15 | (intron 6 31) | ggacttcactgggggttccc G/A ctgcttctgggtggecccgg | 6511 | | |
| TPST2 | 28 | (intron 6 273) | gtttgtctgacactggggac A/G gggcaggaagcaccactatg | 6512 | | |
| TPST2 | 21 | (intron 6 693) | aaagggatttttttgaactt G/C gtaattcaaagatttaagat | 6513 | | |
| TPST2 | 22 | (intron 6 1635) | ccctgggtacagagttggcc T/G tgaacaaacatgagtccttc | 6514 | | |
| TPST2 | 23 | (3′untranslated region 11 | cttccccactttcagatctc C/T gcaaatggcttcattgccaa | 6515 | | |
| CST | 1 | (intron 1b 6302) | agagctccccagagaggact A/G tgaggctgcatgatgcatga | 6516 | | |
| CST | 2 | (intron 2a 1004) | gagtgagacccccatctctg C/T aaaattttttttaaaaagta | 6517 | | |
| CST | 3 | (intron 2a 1395) | atgcctaagtttacagtagc T/C aggcaggaaaggcacaacca | 6518 | | |
| CST | 4 | (intron 1d 473) | ccagagcctgaggttggtgc T/A ggggcccctccatggctgcc | 6519 | | |
| CST | 5 | (intron 2b 726) | ctatctctccagtgcctctc T/C gcccctgtctggaccctgct | 6520 | | |
| CST | 6 | (intron 2b 745) | ctgtccctgtctggaccctg C/A tggggggccacagagcaggc | 6521 | | |
| CST | 7 | (coding region 55 | tcactagtttcctgctgctg C/A tgtactcctatgccgtgccc | 6522 | | |
| | | (Val 29 Met)) | | | | |
| CST | 8 | (intron 3 308) | tcgtctgaggtcaggagttc G/A agaccagcctggccaacatg | 6523 | | |
| CST | 9 | (intron 3 853) | ttttgtcctataaaatggca G/A tttcatgtggcccaagctga | 6524 | | |
| CST | 10 | (Asn 66 Asn)) | gaggcagtgatccgggccaa C/T ggctcggcgggggggtgcca | 6525 | | |
| ST1B2 | 1 | (intron 1 80) | acttgtccataaaatcatta C/T cattctaaataaagttaata | 6526 | | |
| ST1B2 | 2 | (intron 2 − 352) | aacatttaaatagtcattta T/C agcaatgcacaggcataata | 6527 | | |
| ST1B2 | 3 | (intron 2 − 85) | attacataatgctaaaaaat G/A tcttgaaaaactggttggca | 6528 | | |
| ST1B2 | 4 | (intron 4 460) | gtacttgacattaaaaaata T/C ctgatgttt a/g tatatccata | 6529 | | |
| ST1B2 | 5 | (intron 4 470) | ttaaaaaata t/c ctgatgttt A/G tatatccataaatagctaat | 6530 | | |
| ST1B2 | 6 | (intron 4 518) | tttaagattgtcctcatatt C/G ttacttcctttggttactaa | 6531 | | |
| ST1B2 | 7 | (intron 4 616) | aatgtttatgaaaatagact T/C ttatctggttttagtggcct | 6532 | | |
| ST1B2 | 8 | (intron 5 58) | ctgcatcatgctgtaaaagg G/A gtgatatttgctttccaact | 6533 | | |
| ST1B2 | 9 | (coding region 612 | taatagaatccaaaggagga A/C atcaagaagatcattagatt | 6534 | | |
| | | (Glu 204 Asp)) | | | | |
| ST1B2 | 10 | (intron 6 582) | aatacattacttccatttaa G/A tagcctgcccatcgcggctt | 6535 | | |
| ST1B2 | 11 | (intron 6 3130) | agatgtaaaaaattattcaa A/T ttttaaaagccggaaaaatt | 6536 | | |
| ST1B2 | 12 | (3′untranslated region 90 | cctaaagtgcctaaaccaca C/A atcggaagaaacaagagatt | 6537 | | |
| ST1B2 | 13 | (3′flanking region 55) | tcagatcccagttttgttcc T/G ttgattctgagtttccaaat | 6538 | | |
| ST1B2 | 14 | (3′flanking region 328) | tttgacccaggacactgtgt T/G ccactgctgtctaccgagtt | 6539 | | |
| ST1B2 | 15 | (3′flanking region 446) | gtagttcagattttggaaat C/A ttttttctatatcataccta | 6540 | | |
| CHST1 | 1 | (intron 1 3900) | gccctgcccccactcccaga C/G ttgcggccctccagcccctt | 6541 | | |
| CHST1 | 2 | (intron 1 6520) | cctcccccagaggagctggg C/T acactggggccttgtgttgt | 6542 | | |
| CHST1 | 3 | (intron 1 7963) | aaaacattcatgggggatta G/C tgctggctacgtcagagtca | 6543 | | |
| CHST1 | 4 | (intron 1 9173) | gcgctgccacagatcaggcc G/A aggtgggggacagaaatgcc | 6544 | | |
| CHST1 | 5 | (intron 1 9701) | cccagaattctgaatacagc A/G gcgatgacgggactacgagg | 6545 | | |
| CHST1 | 6 | (intron 1 12132) | aacagatccacaggaccaga C/A agcaaaggggaggaacatgc | 6546 | | |
| CHST1 | 7 | (intron 1 12465) | atgcagggaaggggcttggc G/A caaaactgtcaactgagata | 6547 | | |
| CHST1 | 8 | (intron 1 12561) | atgctccctggtccactttc G/A ctttgagtttcaggtagctg | 6548 | | |
| CHST1 | 9 | (intron 3 529) | ccatggtctgcaggggtcct T/G catgctcaggggattggggt | 6549 | | |
| CHST1 | 10 | (intron 3 617) | agaggacagaggaaagagga C/A cacctggagaactgggcgcc | 6550 | | |
| CHST1 | 11 | (intron 3 796) | aagaggcttccgcagctgtc C/T gcaggttaaatcctggggtg | 6551 | | |
| CHST1 | 12 | (intron 3 818) | caggttaaatcctggggtgc A/G aggaatgtttgttcagctcc | 6552 | | |
| CHST1 | 13 | (3′flanking region 762) | ataactggtacaggtttact G/C gtgtctacactggcagagaa | 6553 | | |
| CHST1 | 14 | (intron 1 7874) | gttttccccttgccttgcct T/Δ cattttcatcacctcatttt | 6554 | | |
| CHST1 | 15 | (3′flanking region 335-3 | cacactgccacacctggcta (T)12-15 ggattttagtagagacgggg | 6555 | | |
| CHST2 | 1 | (5′flanking region − 260) | agccggacagtccgccgggc G/A gtgatccgggggccgctccc | 6556 | | |
| CHST2 | 2 | (5′flanking region − 56) | gcgctggggaccagcggccg C/T gcccgcctgggagtcgcggc | 6557 | | |
| CHST2 | 3 | (3′flanking region 218) | aggagtgaaacacatctttg T/A attctaaaggcagaaaccaa | 6558 | | |
| CHST2 | 4 | (3′flanking region 383) | gcagagaccaatgttttggt G/C ctgagctgggttcagaaaaa | 6559 | | |
| CHST2 | 5 | (2340 flanking region 952) | tactgaaacattctgcagaa T/C gttatactctgagaagaaat | 6560 | | |
| CHST3 | 1 | (5′untranslated region − 2 | tccagcgtgccgaccggccc C/G gcagcgcctccatccctccg | 6561 | | |
| CHST3 | 2 | (intron 1 96) | gcgtccaggcgcgcgcgcca G/A actttggagggagaaggggg | 6562 | | |
| CHST3 | 3 | (intron 1 4467) | agagaagaatggggcagagc C/G ggagcagccaggggaggtga | 6563 | | |
| CHST3 | 4 | (intron 1 4853) | ggatgagcactgcccagctg A/G cccctgcccaccctccacag | 6564 | | |
| CHST3 | 5 | (intron 1 4965) | cccacggcagaggggacaca G/C tgaccaggacggaagttggg | 6565 | | |
| CHST3 | 6 | (intron 1 5046) | gggcggtccatctttgtacc C/T cgggttccatcccagtgcct | 6566 | | |
| CHST3 | 7 | (intron 1 5300) | ccttttctcctctaaggcct A/G aagagatgacagaatgctgc | 6567 | | |
| CHST3 | 8 | (intron 1 5354) | agcgcgtggactccacagcg G/A ggcgtggggtggcccctggc | 6568 | | |
| CHST3 | 9 | (intron 1 5428) | gacacgcttcagccctctgt C/G cccaccgccccaaatctggc | 6569 | | |
| CHST3 | 10 | (intron 1 6555) | gagtggggcactgctggaag G/C ctctggcccctgcggcgccc | 6570 | | |
| CHST3 | 11 | (intron 1 6990) | aaacacactgggcccccccc G/A tccccgcactgtgactacac | 6571 | | |
| CHST3 | 12 | (intron 1 7133) | ctgagggcctgtcctgcagg T/G ttgatgtgtctgaagaggcc | 6572 | | |
| CHST3 | 13 | (intron 1 7161) | gtctgaagaggccccgagaa T/C agaaatctagaacctgccag | 6573 | | |
| CHST3 | 14 | (intron 1 7199) | cagtcacgaagcagtgtcac C/T caccagaggatgaagaactg | 6574 | | |
| CHST3 | 15 | (intron 1 7316) | cttgcatctggtgtaggtgc C/T cgggggtagcgtgcccagga | 6575 | | |
| CHST3 | 16 | (intron 1 7967) | gacaggaaccccaccccgag T/G gatgtctggccctgtgacct | 6576 | | |
| CHST3 | 17 | (intron 1 11412) | gcttgcacttctgattcatt C/T tgcagtcactggctctttgt | 6577 | | |
| CHST3 | 18 | (intron 1 11591) | ccctggaagggcctcagtgc G/A gtgactcattacccagcatg | 6578 | | |
| CHST3 | 19 | (intron 1 12541) | acccacacagcatgaatggg G/C ccagccccagcctgcgggct | 6579 | | |
| CHST3 | 20 | (intron 1 12672) | gtagccaaagctggggctgt G/C gggtcagggcatggcaaggg | 6580 | | |
| CHST3 | 21 | (intron 1 14809) | ggatgtgtagggtttgggct C/T ggccttaagggatgggtgga | 6581 | | |
| CHST3 | 22 | (intron 1 16161) | gatgctggtcaggcattgtc G/A gtgggatctttaacaccacc | 6582 | | |
| CHST3 | 23 | (intron 1 16385) | tatttagcatgtgggtttca A/C ctttctgttttttcaaaggg | 6583 | | |
| CHST3 | 24 | (intron 1 33638) | gacttgggccacgtccttgg G/C catgaatcttggtctatgtc | 6584 | | |
| CHST3 | 25 | (intron 1 35145) | agggaagccgaagcctcact T/C gctggggcttgcctggccta | 6585 | | |
| CHST3 | 26 | (intron 1 35340) | tgtgaagttttgcccacagt T/C ggtggccatggttcgcaccg | 6586 | | |
| CHST3 | 27 | (intron 1 35436) | gccactcatgtatggagcaa T/C tgcctttttttcttcctctt | 6587 | | |
| CHST3 | 28 | (intron 1 36150) | acatagaagaggctgggcct G/T aggaagccagggaagcagga | 6588 | | |
| CHST3 | 29 | (intron 1 36194) | ggtgtggggaggccagcagg G/A gcgcgggcctcagcggcgag | 6589 | | |
| CHST3 | 30 | (intron 1 37602) | ctggaacagcaacttaaaaa A/T agaaatagtccctggaaggg | 6590 | | |
| CHST3 | 31 | (intron 1 37725) | gggtagcaagggcagctccc C/T gaccggca c/g ccgccttccca | 6591 | | |
| CHST3 | 32 | (intron 1 37734) | gggcagccccc c/t gacccgga C/G cggccttttcacccctctcc | 6592 | | |
| CHST3 | 33 | (intron 1 38208) | gccattctagatgcgagtcc C/T gactttgggg t/c gctcgcatt | 6593 | | |
| CHST3 | 34 | (intron 2 255) | ctacagctgtgaaaggctag A/G caagatacttaacatttctg | 6594 | | |
| CHST3 | 35 | (3′untranslated region 2 | acacctcagaggagcgtgtg C/A ccaacatttgtaggattatt | 6595 | | |
| CHST3 | 36 | (3′untranslated region 2 | aggcctcatctggggtaggg C/G caagaggaaagtacagagtg | 6596 | | |
| CHST3 | 37 | (3′untranslated region 2 | ctggaactcccccgtagggc C/T cggggaagagtattgcttaa | 6597 | | |
| CHST3 | 38 | (3′untranslated region 2 | cttaacgcaggatgtgctgg G/A tgttttgtttcgggctttta | 6598 | | |
| CHST3 | 39 | (3′untranslated region 2 | gcttggtgtctttcttgttt C/T atggctgtgtttttgctttt | 6599 | | |
| CHST3 | 40 | (3′untranslated region 3 | ccgagggctgcccagctgtg C/T ttctggtttccggggcaatt | 6600 | | |
| CHST3 | 41 | (3′untranslated region 3 | ctgtcagatacggcccatcg T/C aaacccagagggctgcattt | 6601 | | |
| CHST3 | 42 | (3′untranslated region 3 | gttccccatgtggaggtcgg A/G ggggctgggactggggaggg | 6602 | | |
| CHST3 | 43 | (3′untranslated region 3 | ggccctgctaatgtggacag T/C agaccccaggcccccctctt | 6603 | | |
| CHST3 | 44 | (3′untranslated region 4 | ccagatgtgcatagaagcca G/A ccccggccacatacacggca | 6604 | | |
| CHST3 | 45 | (3′untranslated region 4 | caaagcaaatttaggctttt G/A cccggcggcaatacacgcac | 6605 | | |
| CHST3 | 46 | (3′untranslated region 6 | accccaggccggcagggtac G/A agacaccccttcac g/a gcaca | 6606 | | |
| CHST3 | 47 | (3′flanking region 281) | agacaggagtgttgggccag C/T ggccagggggcctggggatg | 6607 | | |
| CHST3 | 48 | (3′flanking region 997) | acctcttaaagtatttgagc C/T ggtgcctgtcatcccaacct | 6608 | | |
| CHST3 | 49 | (intron 1 22595) | cgggagcaggaaaaaaaaaa A/Δ gaataagaagaaaagaggct | 6609 | | |
| CHST3 | 50 | (intron 1 35423-35424) | gctcatgctcacagccactc AT/Δ gtatggagcaa t/c tgcctttt | 6610 | | |
| CHST4 | 1 | (5′flanking region − 1092) | atgaagccttgtgccatctc G/A ctgtgtcgtgccagcacctg | 6611 | | |
| CHST4 | 2 | (5′flanking region − 941) | ctgccagagagaaacaggaa G/A ggaggaagagccacacaatt | 6612 | | |
| CHST4 | 3 | (intron 1 − 150) | caggaaatgatttggagaag G/T actggtgccattgttggcac | 6613 | | |
| CHST5 | 1 | (intron 1 − 144) | ggcctcttaggtttcagcca A/C gacaggtgactcttagcacc | 6614 | | |
| CHST5 | 2 | (intron 2 17) | caacgtcagagcgcttctca T/A tgtccagctcctttgtttct | 6615 | | |
| CHST5 | 3 | (intron 2 139) | aatcccagcactttgggagg C/A ggagatgtgcggatggatca | 6616 | | |
| CHST5 | 4 | (intron 3 1829) | gactgtctgtctgctattca T/C ataggaacaaataattcatg | 6617 | | |
| CHST5 | 5 | (intron 3 2037) | aaatgaaaccaacaccaaca C/G tgcagagaagcaaacaaaag | 6618 | | |
| CHST5 | 6 | (intron 3 2134) | aagcagctaaattgtgttcc G/A tacaggtgcaattaggcagg | 6619 | | |
| CHST5 | 7 | (intron 3 2528) | atggtaaagttcgcctgggt G/A cagtatgtcagcatcctgct | 6620 | | |
| CHST5 | 8 | (intron 3 2674) | gcacttatcctagaaaggcc A/G cccctgaagactcagcagga | 6621 | | |
| CHST5 | 9 | (intron 3 7039) | cgggcccccgccggccaccg T/C gggaccgcagccacgtctga | 6622 | | |
| CHST5 | 10 | (intron 3 7211) | gtagccccaggacaccccca T/G cctcaacatcccattctggg | 6623 | | |
| CHST5 | 11 | (intron 3 7294) | ggagcttccagtggcttggt T/C acccccgactcttcgtccat | 6624 | | |
| CHST5 | 12 | (intron 4 108) | gcagggtcctgcactctgca G/A ggggcaatcacaggtgggag | 6625 | | |
| CHST5 | 13 | (intron 4 402) | agcactggaaaaagtacagt T/C gcacttgtagcggaggtggg | 6626 | | |
| CHST5 | 14 | (intron 4 547) | ctcctgtccccgcattgagg C/G gaaggagcagaggtgagatc | 6627 | | |
| CHST5 | 15 | (intron 4 1142) | gccccaggtctcatagctcc C/G cattggcagtgctgggattt | 6628 | | |
| CHST5 | 16 | (intron 5 1187) | cactgggcagtaattggggc A/G tgggatgggcatgagggccc | 6629 | | |
| HNK-1ST | 1 | (intron 1 139) | gtgttttggcgacttganga C/T ccccctagtccgcaggagta | 6630 | | |
| HNK-1ST | 2 | (intron 1 1020) | acctgagcagaaaattctct T/C cttcgcggaaatgaaaattg | 6631 | | |
| HNK-1ST | 3 | (intron 1 1091) | aagaatttgtaaacatgaca G/A gcaacgggcagctctaggcg | 6632 | | |
| HNK-1ST | 4 | (intron 1 1971) | ctataactatttcaaacata C/T gaaacaggcataattggatt | 6633 | | |
| HNK-1ST | 5 | (intron 1 2096) | acttagaatattcatttacc A/C agaaatccaaatataacctg | 6634 | | |
| HNK-1ST | 6 | (5′untranslated region − 9 | ctacccagtgacaagaggaa C/A caagaacatcagctcagggg | 6635 | | |
| HNK-1ST | 7 | (intron 2 − 530) | agtgggcggaggcgagaagc G/A tcagtgcccaggcctcggct | 6636 | | |
| HNK-1ST | 8 | (intron 2 − 466) | gctacatcttgtcagccagt C/T agaattttaaacacagccag | 6637 | | |
| HNK-1ST | 9 | (intron 2 − 92) | acggaaatatttgtgctgat A/T cctactgactgaaatcacct | 6638 | | |
| HNK-1ST | 10 | (intron 3 152) | cagggcccccgccccggcac G/A ccacagaggcgcgaggggag | 6639 | | |
| HNK-1ST | 11 | (intron 3 312) | cacagtggccccatgccttg C/T agcagggcgcctcccaggct | 6640 | | |
| HNK-1ST | 12 (intron 3 1948) | tcctttgatgtatcaagttt T/C gcgctgaaggttcccagtgt | 6641 | | | |
| HNK-1ST | 13 | (intron 3 2140) | ctacacctggagaggagcac C/T gcagcggtccttaatactgc | 6642 | | |
| HNK-1ST | 14 | (coding region 187 | agaagcacattccggaggaa C/T tgaaggtgggcacagccagg | 6643 | | |
| | | (Leu 63 Leu)) | | | | |
| HNK-1ST | 15 | (intron 4 581) | ccggatcattccctagctgg G/A aggaggggtgcactctggaa | 6644 | | |
| HNK-1ST | 16 | (intron 4 615) | tcgggaaggccgctcacttc G/C taacccccattcgggaccca | 6645 | | |
| HNK-1ST | 17 | (intron 5 7) | gattgttctaaatggtgtgt G/A cgggtctactgaatgtccac | 6646 | | |
| HNK-1ST | 18 | (intron 5 123) | acctgcagggacgggtggcc G/T cccagacaggccggtcggtg | 6647 | | |
| HNK-1ST | 19 | (intron 5 721) | acaaccaggggcccggccca T/C gaaatttagcttcagacagg | 6648 | | |
| HNK-1ST | 20 | (intron 5 867) | cgctgcccacagagtcggtg G/A ccacccctggccactgtttg | 6649 | | |
| HNK-1ST | 21 | (coding region 444 | ccaggagcattttcttccat T/C gaggagatccccgaaaacgt | 6650 | | |
| | | (Ile 148 Ile)) | | | | |
| HNK-1ST | 22 | (intron 6 94) | ctgagttctgtacttggcag A/G ccgatcggaggaccacagag | 6651 | | |
| HNK-1ST | 23 | (intron 6 247) | caggaaggcgacaccacccc G/A ccaacagaaattagcaggca | 6652 | | |
| HNK-1ST | 24 | (coding region 696 | aggaggcaccggacagagac C/G cgggggatccagccggaaga | 6653 | | |
| | | (Thr 232 Thr)) | | | | |
| HNK-1ST | 25 | (coding region 870 | gagaccctggaggacgatgc C/T ccacacaccccaaaagaggc | 6654 | | |
| | | (Ala 298 Ala)) | | | | |
| HNK-1ST | 26 | (3′untranslated region 11 | tcaaacatccctaccagacc T/C ggggctaaccaggtgaagat | 6655 | | |
| HNK-1ST | 27 | (3′untranslated region 11 | ccacacccctcctttgagga C/T gcccggggtctcccacaggc | 6656 | | |
| HNK-1ST | 28 | (3′untranslated region 13 | ggaagcatcacacagcgcta G/A gagccgcctccctcaggcgt | 6657 | | |
| HNK-1ST | 29 | (3′untranslated region 14 | cgaggccccccgggccagcc A/G gggcggcggcacccatcact | 6658 | | |
| HNK-1ST | 30 | (3′untranslated region 15 | gcaagggggctgctgaaatc G/C cagagacttttgcagcatca | 6659 | | |
| HNK-1ST | 31 | (3′untranslated region 16 | gggcggtgcggcgtccaggg G/A cccatctttccagaatccat | 6660 | | |
| HNK-1ST | 32 | (3′untranslated region 18 | aggggaggctttttctacct G/A agaaggggagtgtctttgag | 6661 | | |
| HNK-1ST | 33 | (3′untranslated region 22 | tccagcagtgcggcttcctg G/T c/t aacaaggtaggccctggtg | 6662 | | |
| HNK-1ST | 34 | (3′untranslated region 22 | ccagcagtgcggcttcctg g/t C/T aacaaggtaggccctggtgc | 6663 | | |
| HNK-1ST | 35 | (3′flanking region 1016) | cacacgaaggtgtgcactca C/T ggccggcagggcacccaggt | 6664 | | |
| HNK-1ST | 36 | (3′flanking region 1102) | gcaggcggtgcccaccggga A/C cccccagaagcagggaacag | 6665 | | |
| HNK-1ST | 37 | (3′flanking region 1291) | gccgagaccctcagcaggat A/G gcgcagctacagggcggagc | 6666 | | |
| STE | 1 | (5′flanking region − 605) | caggtttctaaaataataat C/T gaaaggcgagtgatgtttac | 6667 | | |
| STE | 2 | (5′flanking region − 536) | caaaacccccaggccggccg A/G agagttaaaggcaaagagtt | 6668 | | |
| STE | 3 | (5′flanking region ″231) | ccttcttccccaacccctga C/T ggcagacttgggaatttgaa | 6669 | | |
| STE | 4 | (5′untranslated region − 6 | cgcagcttaagatctgcctt G/A gtatttgaagagatataaac | 6670 | | |
| STE | 5 | (intron 1 69) | aaatatagaatgaaaattat G/A caccacaaagctcttaaaaa | 6671 | | |
| STE | 6 | (intron 1 311) | caaggagaaaataaagcaag C/G agggcagaaggaggcagaat | 6672 | | |
| STE | 7 | (intron 1 655) | cctaagaaagtagggactat G/A agaacccctatgtatctata | 6673 | | |
| STE | 8 | (intron 1 672) | ctatgagaacccctatgtat C/T tatatccaccatagtattct | 6674 | | |
| STE | 9 | (intron 1 772) | aaaaggcaggttggaagatg C/A aggaggggagtatgcagaaa | 6675 | | |
| STE | 10 | (intron 1 1715) | taaccatcttgcttaacctt A/G tcatttttagccaagtcatt | 6676 | | |
| STE | 11 | (intron 1 1928) | aaatgatacatattcaggaa A/G tcaaaaatctctgacttaga | 6677 | | |
| STE | 12 | (intron 1 1953) | aaatctctgacttagatacc C/T ggcaataataatcaaatgta | 6678 | | |
| STE | 13 | (intron 1 2087) | aattttgaaagaaattgaag T/G tctgtggtttttatttatca | 6679 | | |
| STE | 14 | (intron 1 2323) | taggtatgtaggagggtccc G/C ttatatacatagttgttaat | 6680 | | |
| STE | 15 | (intron 2 165) | tctattccatgaccacaatt T/G ttacctgtaacttgaatagt | 6681 | | |
| STE | 16 | (intron 2 1707) | cctaggacccaacatgagac A/G taatataccatcagtaaaat | 6682 | | |
| STE | 17 | (intron 3 850) | ggtgtccattccctcaagaa T/G ttatactttgtgttacaccc | 6683 | | |
| STE | 18 | (intron 4 1653) | agtaacaggctagtagataa T/C ataaataactgaggccaacg | 6684 | | |
| STE | 19 | (intron 4 1899) | tacatgaacttagagaatca A/G gtagatcacacacaccaaca | 6685 | | |
| STE | 20 | (intron 4 1930) | cacaccaacaataaaAttac A/G cagaatgataaaagaatttg | 6686 | | |
| STE | 21 | (intron 5 666) | ttctgatcatgtaggaacaa T/C tataaagaaaataataatgt | 6687 | | |
| STE | 22 | (intron 5 982) | aggcaaagcggcAcctcgtg A/C ctcacacaacattatattat | 6688 | | |
| STE | 23 | (intron 7 369) | agattttattcctctctctt T/C ttgagttgaagaaataagtt | 6689 | | |
| STE | 24 | (intron 7 447) | cacctttcaagggtaagtgg C/A aaaaaatagaaattcaaata | 6690 | | |
| STE | 25 | (intron 7 672) | aatcttgctctttgaaccac A/T ctgtcagtgagagtcaggga | 6691 | | |
| STE | 26 | (intron 7 856) | cgttacagaggacttaaaac A/G gttgtcttgcttgcaaacgg | 6692 | | |
| STE | 27 | (3′flanking region 218) | cagcctcccaagtagctagg A/G ctacagacatgtgcaaccat | 6693 | | |
| NQ01 | 1 | (intron 1 80) | aggaggttgtaggggcttgg C/A ctgaattttgttccttgact | 6694 | | |
| NQ02 | 1 | (5′flanking region − 434) | tttctgttgcaccacggacc C/G ccaggctgtaaccgggatac | 6695 | | |
| NQ02 | 2 | (5′flanking region − 406) | gtaaccgggataccagccag A/G gatggggagcgggaggcgca | 6696 | | |
| NQ02 | 3 | (5′intranslated region − 1 | tcctgcggctcctactgggg A/C gtgcgctggtcggaaggtga | 6697 | | |
| NQ02 | 4 | (intron 1 1919) | tcactcaaatagagctgagt T/C agtcactcagctcttagaca | 6698 | | |
| NQ02 | 5 | (intron 1 2004) | acaaactcacatgccaccag C/G catatgatgtaaacatgtaa | 6699 | | |
| NQ02 | 6 | (intron 1 3391) | aaagcagagggctgtgcagg C/T gcccctgcccctagctgagg | 6700 | | |
| NQ02 | 7 | (intron 1 3456) | caaaggcctcatccgcaggg C/A ggccaactctictgttttag | 6701 | | |
| NQ02 | 8 | (intron 1 3595) | actgcccagctttaggttca T/C ccgtgtaagtgttgctggtg | 6702 | | |
| NQ02 | 9 | (intron 1 3596) | ctgcccagctttaggttcat T/C cgggtaagtgttgctggtgt | 6703 | | |
| NQ02 | 10 | (intron 1 3598) | gcccagctccaggcccaccc T/C tgcaagtgctgctggtgtca | 6704 | | |
| NQ02 | 11 | (intron 1 3651) | cccggcctgttgaagggatg A/G atgtgacctctcccacattc | 6705 | | |
| NQ02 | 12 | (intron 1 6036) | tggtgtggcggttcactgat C/T ccccagccttctgctcgatc | 6706 | | |
| NQ02 | 13 | (intron 2 14) | agggcaggtaaggattcact A/G ttgtggagtaagaccctttt | 6707 | | |
| NQ02 | 14 | (intron 2 192) | gccacgtggaagtgtataaa C/T tatcgggaactaccgtgcgg | 6708 | | |
| NQ02 | 15 | (intron 2 635) | cacactgtttagcacctagc A/C ccatcccgggccgcggccca | 6709 | | |
| NQ02 | 16 | (intron 2 685) | agcagcaccccccccccAcc G/A gcggtgacaaaccaaaatgt | 6710 | | |
| NQ02 | 17 | (coding region 139 | ctgatgtgtatgccatgaac T/C ttgagccgagggccacagac | 6711 | | |
| | | (Phe 47 Leu)) | | | | |
| NQ02 | 18 | (intron 3 36) | aatgctctatttataaaaac T/C acccccaggttttccacccc | 6712 | | |
| NQ02 | 19 | (intron 3 728) | aacgtgggcataaaccacca T/C ctagtgccaaaaagcaggtg | 6713 | | |
| NQ02 | 20 | (intron 4 1577) | cgccgctgcacaccccggcc C/T gacaccagccctttctttac | 6714 | | |
| NQ02 | 21 | (intron 4 1832) | ccggccggccacgtggagcc C/T gccttcctccgggcacccac | 6715 | | |
| NQ02 | 22 | (intron 4 2583) | cggtgttacgcacagctcct C/T gtcccctccctgcctgccca | 6716 | | |
| NQ02 | 23 | (coding region 330 | ctgtactggttcagcgtgcc A/G gccatcctgaagggctggat | 6717 | | |
| | | (Pro 110 Pro)) | | | | |
| NQ02 | 24 | (coding region 405 | atcccaggattccacgattc C/T ggcttgccccaggcctgtgc | 6718 | | |
| | | (Ser 135 Ser)) | | | | |
| NQ02 | 25 | (intron 5 21) | gtatgtgctcttggacaagg A/T ccactatggatagttggagg | 6719 | | |
| NQ02 | 26 | (intron 5 253) | atggcaaacaagggagtggg T/C caggtgtcaggtgacggggg | 6720 | | |
| NQ02 | 27 | (intron 6 2435) | ecccccccaaataatctaac T/C gaagggtatgtaacaggtgt | 6721 | | |
| PIG3 | 1 | (5′flanking region − 47) | gggaaggaggaaaggaaaga G/A ggggagggcggttcggctta | 6722 | | |
| PIG3 | 2 | (intron 2 243) | caacaccggacgcccagcag A/C agccccagctccgtagaatc | 6723 | | |
| PIG3 | 3 | (3′flanking region 282) | agcaggccccagccgggccc G/A ccacccaccggggccccacc | 6724 | | |
| PIG3 | 4 | (5′untranslated region − 9 | cccgcgaggatacagcggcc (CCTGY)16 cagacaatatgttagccgtg | 6725 | | |
| PIG3 | 5 | (3′flanking region 625-62 | ctcctcaggccccgcccctt (T) ccattactcacttgggtccc | 6726 | | |
| PIG3 | 5 | (3′flanking region 625-62 | ccccgcaggccccgcccctt ccattactcacttgggtccc | 6727 | | |
| PIG3 | 6 | (3′flanking region 770) | ccacctgggtcccgccccac C/Δ cgccacaaccctgctcaagc | 6728 | | |
| NDUFA1 | 1 | (5′flanking region − 1437) | agggctaaaaatcctgatta T/A acctaccttgaagcttcgaa | 6729 | | |
| NDUFA1 | 2 | (intron 2 3071) | aataaaagtacatggcatat C/A cccgatgggaacagacttgt | 6730 | | |
| NDUFA1 | 3 | (3′flanking region 1218) | aactccatgtgtataaagca A/G caccacagatgacacttcca | 6731 | | |
| NDUFA1 | 4 | (3′flanking region 1411) | ggattgcgccaccccttgac C/T ggcaatgaccttttactttt | 6732 | | |
| NDUFA1 | 5 | (3′flanking region 1411) | ggatcgtgccaccccttgat C/G ggcaatgaccgtttactttt | 6733 | | |
| NDUFA2 | 1 | (intron 2 1087) | aacatacaaaaattagccgg A/G t a/g cggtggcgggcacctgta | 6734 | | |
| NDUFA2 | 2 | (intron 2 1089) | catacaaaaattagccgg a/g t A/G cggcggcgggcacctgtaat | 6735 | | |
| NDUFA2 | 3 | (intron 2 1356) | ttccctgaaacaacccattg T/C ggccatccagaatcagccaa | 6736 | | |
| NDUFA2 | 4 | (3′flanking region 467) | cacagcctcatgggtcagcc C/T actccagagggtgcattccc | 6737 | | |
| NDUFA2 | 5 | (3′flanking region 744) | ggaagcaggggccctggcca C/T agccgctggcagtaagcagg | 6738 | | |
| NDUFA2 | 6 | (3′flanking region 838-83) | catagtctacaaagaatgaa (ACAC) aaagatcataacaatagcta | 6739 | | |
| NDUFA2 | 6 | (3′flanking region 838-83) | catagtctacaaagaaggaa aaagatcataacaata | 6740 | | |
| NDUFA3 | 1 | (intron 2 2656) | tccctgctgccctcccctgc G/A cactttatcttccctttgcc | 6741 | | |
| NDUFA3 | 2 | (coding region 241 (Lec 81 | agggccccagcctggagtgg C/G tgaagaaactgtgagcacct | 6742 | | |
| NDUFA3 | 3 | (3′flanking region 1019) | tccttacctgcactggcacc A/G gctctggagccccagtccct | 6743 | | |
| NDUFA5 | 1 | (intron 3 2155) | agactctagcatggtacctg G/C aacataaggttccttagaaa | 6744 | | |
| NDUFA5 | 2 | (intron 3 2493) | ggcatattgctagttttctc G/T gtctcaatttcatcatctat | 6745 | | |
| NDUFA5 | 3 | (intron 3 2712) | acaaattttgaactgttcac C/T taacacaggctttttctgaa | 6746 | | |
| NDUFA5 | 4 | (3′flanking region 1296) | aggtatctaaaaggtattgc A/C atttggtcattggttctttc | 6747 | | |
| NDUFA5 | 5 | (intron 3 30-31) | aagtcagttttgttgtcttg (GATTTGTGGTATCCAG) | 6748 | | |
| | | | tgtaacatttaaccaaaaaa | | | |
| NDUFA5 | 5 | (intron 3 30-31) | aagtcagttttgttgtcttg | 6749 | | |
| | | | tgtaacatttaaccaaaaaa | | | |
| NDUFA5 | 6 | (intron 3 427-428) | attaagtagcagttaataaa AG/Δ tctagactgctgattcatac | 6750 | | |
| NDUFA5 | 7 | (intron 3 4733-4734) | tataggaattttaaaatata TA/Δ ggatattgaaacattcagtt | 6751 | | |
| NDUFA6 | 1 | (5′flanking region − 1148) | tttataatttatatatgtta C/T gtgctttcttttgtatagct | 6752 | | |
| NDUFA6 | 2 | (5′flanking region − 363) | actacccaggagcgcggcgg G/A cagccggatagcaggacgct | 6753 | | |
| NDUFA6 | 3 | (coding region 26 (Ala 9 V | ggggagcggcgtccgccaag C/T tacttctaccgccagcacct | 6754 | | |
| NDUFA6 | 4 | (intron 1 1318) | attcagcagtttgaaaacat A/G atgtttgcctggcagaatac | 6755 | | |
| NDUFA6 | 5 | (intron 2 562) | agttaaagaatctgaaaagt G/C tcagaaatgatttaccctga | 6756 | | |
| NDUFA6 | 6 | (5′flanking region − 861) | ctgtaaaatggggatgctga (T) ggtacctacctgacctatga | 6757 | | |
| NDUFA6 | 6 | (5′flanking region − 861) | ctgtaaaatggggatgctga ggtacctacctgacctatga | 6758 | | |
| NDUFA6 | 7 | (intron 1 1251-1278) | tgtggggagtgcctgtagca (GT)12-14 ttcggggtggtgcattcaaa | 6759 | | |
| NDUFA7 | 1 | (5′flanking region − 731) | accaaccaaaggtctatcaa A/G ggggtgtcctctttgcaccc | 6760 | | |
| NDUFA7 | 2 | (5′flanking region − 434) | aaagggaaccatcagaeccc C/T gtgatgaaatgagaatcggc | 6761 | | |
| NDUFA7 | 3 | (5′flanking region − 395) | gctcccggattccggctggc A/G ggggttagggcagggtagag | 6762 | | |
| NDUFA7 | 4 | (5′flanking region − 100) | agaggagtcacgtgcttcgg G/A gagagcctttataggacgtt | 6763 | | |
| NDUFA7 | 5 | (intron 1 92) | tcacctccctcctaagccgg G/A acccttcgctctccccgaat | 6764 | | |
| NDUFA7 | 6 | (intron 1 133) | ctccctgggaacccccagct A/G gt c/g accccttcagcccggga | 6765 | | |
| NDUFA7 | 7 | (intron 1 136) | cctgggaacccccagct a/c gt C/G accccttcagcccgggaccc | 6766 | | |
| NDUFA7 | 8 | (intron 2 89) | tcctttagacccctgaaacg G/C agggctgacatcctgccacc | 6767 | | |
| NDUFA7 | 9 | (coding region 196 | gcagccgggaatctgtgccc C/G cttccatcatcatgtagtcg | 6768 | | |
| | | (Pro 66 Ala)) | | | | |
| NDUFA7 | 10 | (intron 3 4203) | gcctccacccctggggcgcc T/G cctccatcaccccaccctcc | 6769 | | |
| NDUFA7 | 11 | (intron 3 4604) | gggccttgtgtacgctggag A/G ccaaaagtgggaagggagga | 6770 | | |
| NDUFA7 | 12 | (5′flanking region | agggtccagggtcccctgct CAGAGGCT/Δ aacactggccgaagagaa | 6771 | | |
| | | (−1353)-(−1360)) | | | | |
| NDUFA7 | 13 | (5′flanking region | agccctgatccacccactct CT/Δ gaaacttctctgctaataaa | 6772 | | |
| | | (−1233)-(−1234)) | | | | |
| NDUFA7 | 14 | (intron 2 4142-4143) | cattttgtgactgaggtgac AG/Δ gggcccacagcggggccatg | 6773 | | |
| NDUFA8 | 1 | (intron 1 − 75) | tttgtgttctctattctgac C/T cgcatgaggtaaagctgaga | 6774 | | |
| NDUFA8 | 2 | (intron 2 790) | caaacctagacaaagtgtgc C/T ctttatccagaagtgagcag | 6775 | | |
| NDUFA8 | 3 | (intron 2 900) | ttcaggagataaaaagctct G/A attgctcaggcctgagatgg | 6776 | | |
| NDUFA8 | 4 | (intron 2 3837) | gaagttgtcttgtaagtgag A/G taagaatatgtactcacata | 6777 | | |
| NDUFA8 | 5 | (intron 2 3942) | tcattgttttgcaaagagat G/T cccctaacccagctttcttt | 6778 | | |
| NDUFA8 | 6 | (intron 3 − 66) | gaggagacaccaggaggcgc A/G ttgatggttacagattcctc | 6779 | | |
| NDUFA8 | 7 | (3′untranslated region 52 | tttatttctggaccaagtaa A/G gatgggtccgtggcccacac | 6780 | | |
| NDUFA8 | 8 | (3′flanking region 367) | gtcatacaaggggagcctcc A/G ggatagaagtgcagaeactt | 6781 | | |
| NDUFA8 | 9 | (3′flanking region 777) | attcttttttcactactagg C/T tgtttcctccacatctgact | 6782 | | |
| NDUFA8 | 10 | (3′flanking region 1053) | aaagaaaaagcaetgtgtga T/A ctgccatggccgcttctgca | 6783 | | |
| NDUFA8 | 11 | (3′flanking region 1190) | gattctctaatgaaaaataa G/T acttttttttgcattttttt | 6784 | | |
| NDUFA8 | 12 | (intron 2 449-453) | tcattgtgcatgatacttaa GTAAA/Δ aaaaaactaagctgtgtaat | 6785 | | |
| NDUFA8 | 13 | (intron 2 455-459) | tgcatgatacttaagtaaaa AAAAA/Δ ctaagctgtgtaattgtagg | 6786 | | |
| NDUFA8 | 14 | (intron 2 707-708) | tcattttggaaagactctca (A) ccttgctgtaccaaaaatgg | 6787 | | |
| NDUFA8 | 14 | (intron 2 707-708) | tcattttggaaagactctca ccttgctgtaccaaaaatgg 6788 | | | |
| NDUFA9 | 1 | (5′flanking region − 807) | gatggctctttgtagaacaa T/C gcagattctcaaaggtgacc | 6789 | | |
| NDUFA9 | 2 | (5′flanking region − 769) | accacagttaaagaaaaaat T/C anaagccattgcgctagaga | 6790 | | |
| NDUFA9 | 3 | (5′flanking region − 353) | cacaccctattttggtttct C/G ttctccacttttcccctcgt | 6791 | | |
| NDUFA9 | 4 | (5′flanking region − 322) | ttcccctcgttcttgtcccc C/T ctcctccccctcctgggccc | 6792 | | |
| NDUFA9 | 5 | (intron 1 447) | attcatatgagcacaatgga A/G atgataatattacaatacca | 6793 | | |
| NDUFA9 | 6 | (intron 1 1039) | ggcttgatgttcagcctgag G/A caagaattaggagtgtttag | 6794 | | |
| NDUFA9 | 7 | (intron 1 4010) | aatgtatccaaaagagactc T/G cattcctgccatatgaagaa | 6795 | | |
| NDUFA9 | 8 | (intron 3 49) | gacaaatataaattactaag G/A tcatttctaggagtgatagg | 6796 | | |
| NDUFA9 | 9 | (intron3 107) | aatttcttcccagaatggac C/T aaaggcaccctccgttccca | 6797 | | |
| NDUFA9 | 10 | (intron 3 1183) | atctctggtaatattcatac A/G gattatttgtaatcccttta | 6798 | | |
| NDUFA9 | 11 | (intron 3 1395) | attcctagttctttgtccct C/T aagtttgttggtcaccttgt | 6799 | | |
| NDUFA9 | 12 | (intron 3 2363) | agaaaatagtcatgaatggc C/T ccaactaacaccagtcttta | 6800 | | |
| NDUFA9 | 13 | (intron 3 2608) | gtcatttgattacctgagta A/C agtgtactgttacctgtttg | 6801 | | |
| NDUFA9 | 14 | (intron 4 561) | attttataaattctttgatg A/C cttgggggtcttattcaact | 6802 | | |
| NDUFA9 | 15 | (intron 4 860) | attgtgtagagtaatgacag C/T agagctgtcaacttttttaa | 6803 | | |
| NDUFA9 | 16 | (intron 4 879) | gcagagctgtcaactttttt A/T aaaaaataattttagcttaa | 6804 | | |
| NDUFA9 | 17 | (intron 4 893) | ttttttaaaaaaataatttt A/G gcttaaaaaaattaaaaatt | 6805 | | |
| NDUFA9 | 18 | (intron 4 1090) | atcattgctgtttaaaagtt T/C aagtagtgtgaatttcagta | 6806 | | |
| NDUFA9 | 19 | (intron 4 1188) | aaccaatccttttatttttt A/T tcttccagaaactttgattt | 6807 | | |
| NDUFA9 | 20 | (intron 5 161) | gggtgtgtgtgatgttttga C/T gttttgattgattgccttct | 6808 | | |
| NDUFA9 | 21 | (intron 5 373) | ctttctcaccgcttgcactg C/T agtggttttgtgccactctt | 6809 | | |
| NDUFA9 | 22 | (intron 5 457) | gccagggaagatgcctattc A/C cacagtgcttatgctccttt | 6810 | | |
| NDUFA9 | 23 | (intron 5 3113) | gatttttctccttcttcaat G/A taagcttcccttaaaataaa | 6811 | | |
| NDUFA9 | 24 | (intron 5 3339) | tctaaactcaaaacaggttt G/A tttggttattgtttaggctg | 6812 | | |
| NDUFA9 | 25 | (intron 6 414) | tatagttttgccttttccag G/C atattacatatatggttaga | 6813 | | |
| NDUFA9 | 26 | (intron 6 518) | ctttcatttcttttcatagc T/C tgatagctcatttctttata | 6814 | | |
| NDUFA9 | 27 | (intron 7 974) | ggattatgcgtacttggaaa A/G tacttggatagcggtgatta | 6815 | | |
| NDUFA9 | 28 | (intron 8 368) | acattaattttgatggagta T/G cacaatgcctccagaggctg | 6816 | | |
| NDUFA9 | 29 | (intron 8 954) | gcatgccatgagttatatag T/C ctagataagaattacaattc | 6817 | | |
| NDUFA9 | 30 | (intron 8 1253) | tcctcttgaaattgtagata G/T gtatctacacatttctcatc | 6818 | | |
| NDUFA9 | 31 | (intron 8 11608) | gaaaagatagatgtataaat G/A accaaaaattcgtgaagaaa | 6819 | | |
| NDUFA9 | 32 | (intron 8 11930) | ctacaaatatattctaaatg C/T gtaatcatggataagtacaa | 6820 | | |
| NDUFA9 | 33 | (intron 9 1998) | tgtttttcaagcctttaaac G/A gctgtggaaccctgtgctca | 6821 | | |
| NDUFA9 | 34 | (intron 9 2239) | ccagctacttgggaggctga A/G gtgggaggatcacttgagcc | 6822 | | |
| NDUFA9 | 35 | (intron 9 2885) | acagcggtctgtcttcctgc A/G gttctcataggctagcttac | 6823 | | |
| NDUFA9 | 36 | (intron 10 801) | tacactaaagtgtctcttac G/A tttatacttgagaaagtgtt | 6824 | | |
| NDUFA9 | 37 | (intron 10 910) | tgcagactttcaggtgggta G/C gatgagggattgctgctgct | 6825 | | |
| NDUFA9 | 38 | (intron 10 1180) | aaaactgagtcagaacgccg G/A tgctcagaaaacaggggcgt | 6826 | | |
| NDUFA9 | 39 | (3′flanking region 554) | gtgccagcacttaggaatta T/G gaccttctaatgaagttctt | 6827 | | |
| NDUFA9 | 40 | (5′flanking region | taaacagtaggggcaagata (TC) gagtggaaacagccaagatt | 6828 | | |
| | | (−1129)-(−1128)) | | | | |
| NDUFA9 | 40 | (5′flanking region | taaacagtaggggcaagata gagtggaaacagccaagatt | 6829 | | |
| | | −1129)-(−1128)) | | | | |
| NDUFA9 | 41 | (5′flanking region − 341) | tggtttct c/g ttctccacttt T/Δ cccctcattcttatcccc c/ | 6830 | | |
| NDUFA9 | 42 | (intron 4 594) | attcaactttttatcccccc T/Δ aatgattaacatagtgtatt | 6831 | | |
| NDUFA9 | 43 | (intron 10 356-375) | taacttcctcctaacgtcct GAAGAAACTGTTGACAGTTT/Δ | 6832 | | |
| | | | cttccttctttctttaacct | | | |
| NDUFA9 | 44 | (intron 10 379-381) | gaaactgttgacagtttctt CCT/Δ tctttctttaacctactcca | 6833 | | |
| NDUFA9 | 45 | (intron 10 384-387) | tgttgacagtttcttccttc TTTC/Δ tttaacctactccagtcagg | 6834 | | |
| NDUFA9 | 46 | (intron 10 436-437) | ccatttctcccctaaacttg (TTCTTTTAAAATTG) ctcttttcaaaat | 6835 | | |
| NDUFA9 | 46 | (intron 10 436-437) | ccatttctcccctaaaattg ctcttttcaaggt | 6836 | | |
| NDUFA9 | 47 | (intron 10 495-496) | gccacatccaatggtcagtt (TTCAGGCCTTT) ctcagacctcatgtca | 6837 | | |
| NDUFA9 | 47 | (intron 10 495-496) | accacatccaatagtcagtt ctcaaacctcatgtcc 6838 | | | |
| NDUFA9 | 48 | (intron 10 519-520) | gacctcatgtcatgtgcctg (GGCCTG) tgcatttgcttctagggagg | 6839 | | |
| NDUFA9 | 48 | (intron 10 519-520) | gacctcatgtcatgtgcctg tgcatttctgtctagggagg | 6840 | | |
| NDUFA9 | 49 | (intron 10 558-559) | gatgcaaaataaaataaaaa (A) tactataccaataccacatc | 6841 | | |
| NDUFA9 | 49 | (intron 10 558-559) | gatgcaaaataaaataaaaa tactataccaataccacatc | 6842 | | |
| NDUFA10 | 1 | (5′flanking region − 1734 | tgcaccttgaactgtttact T/C tcctgtaaccatttaccctt | 6843 | | |
| NDUFA10 | 2 | (5′flanking region − 1492 | aaaacatccacgcaaacagg T/C tgtgagaagttacgtctgcg | 6844 | | |
| NDUFA10 | 3 | (intron 3 370) | aagactgtgcatgtgccatg C/A agacagagatgtggatgcca | 6845 | | |
| NDUFA10 | 4 | (intron 3 2485) | ttgttattttcttttctctg G/A aatgcagtgatcagttgaca | 6846 | | |
| NDUFA10 | 5 | (intron 4 236) | ctgtgaaagcagattggagc C/T ctggacctcaaacacacgca | 6847 | | |
| NDUFA10 | 6 | (intron 4 1742) | tgtcggcatctgctgagtgt C/T tgctgaagtctgaggactgg | 6848 | | |
| NDUFA10 | 7 | (intron 4 2090) | ggctgggggaaagcagatca T/C gttggctaaaggacaggtgg | 6849 | | |
| NDUFA10 | 8 | (intron 4 3054) | cagctgattatactactgaa A/C cgggataaatg c/t agcttgat | 6850 | | |
| NDUFA10 | 9 | (intron 4 3066) | ctactgaa a/c cgggataaatg C/T agcttgatgattttcagctg | 6851 | | |
| NDUFA10 | 10 | (intron 4 3377) | gtcacagtttaaatgctgct G/A ttttactctgtgtaagtagc | 6852 | | |
| NDUFA10 | 11 | (intron 5 46) | aagcatctctattttgaatg T/C agatcagcactaaaagccct | 6853 | | |
| NDUFA10 | 12 | (intron 8 1465) | gcaacacccagttcctggta C/T aggcctcatatccagcgtgc | 6854 | | |
| NDUFA10 | 13 | (intron 8 1809) | cctggaggcacaaggatggc C/A ggggcactcaacttccctct | 6855 | | |
| NDUFA10 | 14 | (intron 8 11226) | gttgtgtgactgtgtggggc A/G tctcacctctcgggctgcag | 6856 | | |
| NDUFA10 | 15 | (intron 8 11319) | atcttgccttccctcctgcc G/A tctgttcaggcttgaatcct | 6857 | | |
| NDUFA10 | 16 | (intron 8 11386) | ccataatcctagcttgaacc C/T tcctttttccctgctgaccc | 6858 | | |
| NDUFA10 | 17 | (intron 8 13361) | ccaggccactgattgctttc G/A cattttctagcattttctta | 6859 | | |
| NDUFA10 | 18 | (intron 9 183) | tttctgtgtggaaagctgat G/A aagtcctcagatgacagccc | 6860 | | |
| NDUFA10 | 19 | (intron 9 8028) | gaggacattccacagaacgt G/A tgactattagagcagaaggt | 6861 | | |
| NDUFA10 | 20 | (intron 9 10742) | ctggaggagaggggtggagc C/G agttcagccagcactggggt | 6862 | | |
| NDUFA10 | 21 | (intron 9 13908) | cacattgttatgtaaccaag C/T ct g/t gaattgcagtgtgaaga | 6863 | | |
| NDUFA10 | 22 | (intron 9 13911) | attgttatgtaaccaag c/t ct G/T gaattgcagtgtgaagaact | 6864 | | |
| NDUFA10 | 23 | (intron 9 14064) | tcttgactattagaaaccct A/G tcagataaattttaaaacag | 6865 | | |
| NDUFA10 | 24 | (intron 9 14184) | tggctttggttgggaacagc G/A agagatacagaaccgacggt | 6866 | | |
| NDUFA10 | 25 | (intron 9 16487) | cttgaagctgatcgttccct C/A cttgaagctgatcgttccct | 6867 | | |
| NDUFA10 | 26 | (intron 9 16779) | gccagacgtgactgctttag G/A ttcctcatgacattcagacc | 6868 | | |
| NDUFA10 | 27 | (intron 9 17663) | ttccaaatcaccccagaact T/G tgcagtattttgaagctcct | 6869 | | |
| NDUFA10 | 28 | (5′flanking region | gtaaaattgttttaactaga (C)9-11 ttcctaaaccaaggtataaa | 6870 | | |
| | | (−1668)-(−1609) | | | | |
| NDUFA10 | 29 | (5′flanking region | ctgtatccattggaaggcac (A)15-21 tgcaaaggaaacaaggcaaa | 6871 | | |
| | | (−1355)-(−1334) | | | | |
| NDUFA10 | 30 | (intron 1 46-61) | tggcggggtggcagggtggc GGGGTGGCGGGGTGGG/Δ gagcagttcc | 6872 | | |
| NDUFA10 | 31 | (intron 4 2486) | ctcactggaacttttttttt T/Δ aatttaatttttaaaatttt | 6873 | | |
| NDUFA10 | 32 | (intron 7 1600-1601) | cacttccattctgactgtta (A) cggtgtgattcttcctgcca | 6874 | | |
| NDUFA10 | 32 | (intron 7 1600-1601) | cacttccattctgactgtta cggtgtgattcttcctgcca | 6875 | | |
| NDUFA10 | 33 | (intron 9 1054) | gcgcgtgctgtttctccctt A/Δ tctgtccttgtacacgtgtg 6876 | | | |
| NDUFA10 | 34 | (intron 9 8161-8172) | tttctcgctttctgggagac (T)10-12 aatgttgaaaatatgtgttt 6877 | | | |
| NDUFA10 | 35 | (intron 9 8646-8647) | aattcccccattgcttctct (TT) ctgtagacattttaaaccta | 6878 | | |
| NDUFA10 | 35 | (intron 9 8646-8647) | aattcccccattgcttctct ctgtagacattttaaaccta | 6879 | | |
| NDUFA10 | 36 | (intron 9 16503-16523) | ccct c/a cttgaagctgatcgt TCCCTCCTTGAAGCTGATCGT/Δ | 6880 | | |
| | | | gtccaagatagttgctagga | | | |
| NDUFA10 | 37 | (intron 9 17905-17936) | caaatatatgtatacatgta (CA)12-18 tccttcatgaaaactctttc | 6881 | | |
| NDUFAB1 | 1 | (intron 1 8451) | cagcaccctgtagaggcctc G/A ggatgctgaagatgccatga | 6882 | | |
| NDUFAB1 | 2 | (intron 1 8495) | gacacaggcattctgcagac G/A ccagacaattttagtggcag | 6883 | | |
| NDUFB3 | 1 | (5′flanking region − 1439) | ttaaaagttgacttttttct G/A cc g/a ggcacggtggctcacgc | 6884 | | |
| NDUFB3 | 2 | (5′flanking region − 1436) | aaagttgacttttttct g/a cc G/A ggcacggtggctcacgcctg | 6885 | | |
| NDUFB5 | 1 | (5′flanking region − 213) | ggcggatgaaactctcctac A/C aagaagggccaaaccggccg | 6886 | | |
| NDUFB5 | 2 | (intron 1 6288) | ggggatgttgattacctagg T/C cagtaaagtaaagaaggcat | 6887 | | |
| NDUFB5 | 3 | (intron 1 − 1581) | ctcctgggccacggtatcct A/G tcccttcccctcgttaccct | 6888 | | |
| NDUFB5 | 4 | (intron 1 − 1487) | ccctcttagaccgtatatag T/G cctagcataggatctgcaca | 6889 | | |
| NDUFB5 | 5 | (intron 2 556) | gtgtctggaccatctgccac G/A gtagataaagctctgcatca | 6890 | | |
| NDUFB5 | 6 | (intron 3 467) | ggcgccatcgcactccagcc C/T gggcaacagagtgagactct | 6891 | | |
| NDUFB5 | 7 | (intron 3 497) | agcgaggctctgcccccccc C/G caaaaaaaaactataatcct | 6892 | | |
| NDUFB5 | 8 | (coding region 397 | acaacagccctgaaaagata T/C aggaaagaacaatggccgtc | 6893 | | |
| | | (Tyr 133 His)) | | | | |
| NDUFB5 | 9 | (intron 1 213-215) | attagcatttctaaaacgtt GTT/Δ attcaccatcccaattaatg | 6894 | | |
| NDUFB7 | 1 | (intron 1 68) | cctgaacacctggcacccca G/A ggctggcaccccagggctgg | 6895 | | |
| NDUFB7 | 2 | (intron 2 266) | gggctctctaggggcctgtt T/C gatggggacagggcaggtgg | 6896 | | |
| NDUFB7 | 3 | (intron 1 4480-4481) | agttctgaggctgagagaga (GA) ggccacgccgccggccagtg | 6897 | | |
| NDUFB7 | 3 | (intron 1 4480-4481) | agttctgaggctgagagaga ggccacgccgccggccagtg | 6898 | | |
| NDUFS1 | 1 | (5′flanking region − 3) | tcctagggggtcgtcgtggt C/G cagacagtttagcagaacag | 6899 | | |
| NDUFS1 | 2 | (intron 1 445) | gtgttagcaatggctcacgc T/C cctgtttgttgtccttgttt | 6900 | | |
| NDUFS1 | 3 | (intron 1 470) | cttgttgtccttgtttgttt G/T gcccaccgaccacgctggac | 6901 | | |
| NDUFS1 | 4 | (intron 1 502) | acgttggacagcattttttt A/G ttcctttaactaacgggaaa | 6902 | | |
| NDUFS1 | 5 | (intron 1 557) | ttttgaaaagttagcccagg A/G ttgcattgcaaataacaaaa | 6903 | | |
| NDUFS1 | 6 | (intron 1 5218) | tatctcagaatatctcagga A/G catttagtagacagctatgc | 6904 | | |
| NDUFS1 | 7 | (intron 3 1371) | aagccctaaaatagatagtg T/G caatgggaatgaaaacaaga | 6805 | | |
| NDUFS1 | 8 | (intron 5 414) | ttttgaaacgaggtctcacc A/G tgttgtccaggctgggcttg | 6906 | | |
| NDUFS1 | 9 | (intron 10 812) | gagtgcggtggcgcgatctc G/A acctcgggtcactgcagcct | 6907 | | |
| NDUFS1 | 10 | (intron 11 233) | ggaggccaaggcaggcagat C/T gcccaagcgcaggagtttga | 6908 | | |
| NDUFS1 | 11 | (intron 11 263) | ggccaacatggcgaaacccc G/A cctctactaaaaatacaaaa | 6909 | | |
| NDUFS1 | 12 | (intron 11 585) | ctgtatgtcttaattttaaa G/T taaatttgcatttcatatat | 6910 | | |
| NDUFS1 | 13 | (coding region 1251 | gcaccactgtttaatgctag A/G actcgaaagaggttggcaac | 6911 | | |
| | | (Arg 417 Arg)) | | | | |
| NDUFS1 | 14 | (intron 13 5159) | atgacctttagaaaacgcgc T/C ccagcggatacccaggcata | 6912 | | |
| NDUFS1 | 15 | (intron 14 250) | aaaaagtgttatattagtta C/T accttggtccaaaaattgca | 6913 | | |
| NDUFS1 | 16 | (intron 14 550) | gataaagtctcactatgttg C/T ccaggccgatcccaaactcc | 6914 | | |
| NDUFS1 | 17 | (intron 14 2429) | ctgaaaatacaaaaactagc C/T gggcgcggtggcatgtgcct | 6915 | | |
| NDUFS1 | 18 | (intron 14 2530) | ttacagtgagccgagatcac G/T ccactgcgctccagcctggg | 6916 | | |
| NDUFS1 | 19 | (intron 14 2659) | acacacttaattttttacat T/C gaaaacactgcagctagggt | 6917 | | |
| NDUFS1 | 20 | (intron 16 150) | agaaaacatgcaggcagaaa C/T aggaaggcaaggttacagtg | 6918 | | |
| NDUFS1 | 21 | (intron 18 279) | cactgtgtagcaatttatgg T/C gaatcttccaaagtggcaaa | 6919 | | |
| NDUFS1 | 22 | (3′flanking region 182) | cccaggacaactacaactaa T/A aacaaccacagtaacaaggg | 6920 | | |
| NDUFS1 | 23 | (intron 12 3226) | aaatgtattgtctgtgcttt T/Δ aacatttttgtaatagtaaat | 6921 | | |
| NDUFS3 | 1 | (5′flanking region − 194) | tctgccacaaggagctagga C/T cacgctcaccgcacgattcc | 6922 | | |
| NDUFS3 | 2 | (intron 1 46) | cggggtcaggcgcagcggcg T/C gcccagcgcagagagccccg | 6923 | | |
| NDUFS3 | 3 | (intron 6 − 439) | aaagctgtgtcaaaggtacc G/A ctttagatctggactgtgaa | 6924 | | |
| NDUFS3 | 4 | (intron 6 − 280) | ggcgggcgagcagccagccc G/A gagccccggatgcgggagcg | 6925 | | |
| NDUFS4 | 1 | (5′flanking region − 439) | aactgaacacagccctgccc T/A gagggcttgcaaagtgaatc | 6926 | | |
| NDUFS4 | 2 | (intron 1 1829) | gaaaaaaaaccctaaggcca G/T ggaagacgtcccctaaatac | 6927 | | |
| NDUFS4 | 3 | (intron 1 2057) | attaatgggaaaatctacat C/G caaaactcactttattgtaa | 6928 | | |
| NDUFS4 | 4 | (intron 1 − 521) | ctcatttcaaccaacttcat T/G tcccccactttgcgaagggg | 6929 | | |
| NDUFS4 | 5 | (intron 3 − 1259) | ataaaattatgatattatta G/A cactaacacagccagccaca | 6930 | | |
| NDUFS4 | 6 | (intron 3 − 1174) | aatatatataattataggaa T/C ctcagagtagcaaccatggt | 6931 | | |
| NDUFS4 | 7 | (intron 4 10682) | cacaatataggcacaaactt A/C ctaccaaagccctaacaagc | 6932 | | |
| NDUFS4 | 8 | (intron 4 12299) | cttactatatagatataggg A/T atagactatagagtatctct | 6933 | | |
| NDUFS4 | 9 | (intron 4 12560) | accaaataaggtattatgca G/A gctcacctccccacataaga | 6934 | | |
| NDUFS4 | 10 | (intron 4 18801) | ggaaagacttgccgggccag T/C gcacccgaaaccgcggccat | 6935 | | |
| NDUFS4 | 11 | (intron 4 19888) | ccgcacagctgagaagagca A/G ggggcgggtttccagtaccc | 6936 | | |
| NDUFS4 | 12 | (intron 4 20178) | agaaaagatgagtataattc G/A tctaacttacccattcttaa | 6937 | | |
| NDUFS4 | 13 | (intron 4 23016) | ctactctgtgaaagtaaggt T/A atgttgaacaagtaaattaa | 6938 | | |
| NDUFS4 | 14 | (intron 4 23124) | sctttctttcgagatggagt T/A ccagcagttgggaatgtaat | 6939 | | |
| NDUFS4 | 15 | (intron 1 766) | tgtgatgatttttttttttt T/Δ ggctgtattaaccttccatt | 6940 | | |
| NDUFS4 | 16 | (intron 1 1261) | tttctttctctttttttttt T/Δ gagatacattctcactctga | 6941 | | |
| NDUFS4 | 17 | (intron 4 1974+ 19745) | ctcatcatttaggtgctggt (T) agttgggtttgtcgcaaatc | 6942 | | |
| NDUFS4 | 17 | (intron 4 1974+ 19745) | ctcatcatttaggtgctggt agttgggtttgtggcaaatc | 6943 | | |
| NDUFS5 | 1 | (intron 1 388) | ccaaacatacccagcacttc C/T ggctgtaactccggcctgtt | 6944 | | |
| NDUFS5 | 2 | (intron 1 − 13082) | agtgagccgagattgcacca G/A tgcattccaccctgggcaac | 6945 | | |
| NDUFS5 | 3 | (intron 1 − 12905) | gttttcaacaaaggactcca G/T agtagtagagaactttctgt | 6946 | | |
| NDUFS5 | 4 | (intron 1 − 12564) | attttcatcacacctcaact T/G aaggtataacagccttaaga | 6947 | | |
| NDUFS5 | 5 | (intron 1 − 12561) | ttcatcacacctcaacttaa G/A gtataacagccttaacaatc | 6948 | | |
| NDUFS5 | 6 | (intron 1 − 10561) | aacaatgtggtatagtgggg C/G gggtggtgagcaggtgtcat | 6949 | | |
| NDUFS5 | 7 | (intron 1 − 9065) | cctgatgctcctggctccag G/A gtagaccttttccctttaga | 6950 | | |
| NDUFS5 | 8 | (intron 1 − 8871) | tcaccacgtctctgtagata T/C aggaccgcagaccttcgctt | 6951 | | |
| NDUFS5 | 9 | (intron 1 − 7312) | aaatccttggcttctagaat G/T ggtcactgatggtatataat | 6952 | | |
| NDUFS5 | 10 | (intron 1 − 6827) | aacctctgcctccccgattc A/G ccccattctcctgcctcacc | 6953 | | |
| NDUFS5 | 11 | (intron 1 − 6725) | agtagagacggggtttcacc G/A tgttagccagcatggtctcg | 6954 | | |
| NDUFS5 | 12 | (intron 1 − 6631) | aggcgtcagccactccgccc G/A gcctagaccttcttcttata | 6955 | | |
| NDUFS5 | 13 | (intron 1 − 6531) | cccaacagctcccaatgtaa A/G acagatctcttaatattctg | 6956 | | |
| NDUFS5 | 14 | (intron 1 − 6346) | gcaacagatcttgacctata T/C cccatagggtacacctgagg | 6957 | | |
| NDUFS5 | 15 | (intron 1 − 6327) | atcccatagggtacagctga G/C gactttaatcagaaaaggag | 6958 | | |
| NDUFS5 | 16 | (intron 1 − 6122) | tagccttgcttttactctac T/C gttcctcccaaatcacaccc | 6959 | | |
| NDUFS5 | 17 | (intron 1 − 2512) | acaaactcttaatgcgaatt T/C tgcagatcaaagtgggctta | 6960 | | |
| NDUFS5 | 18 | (intron 1 − 1945) | tttaatctcctttaaatttc G/A caatttcacaacctagggta | 6961 | | |
| NDUFS5 | 19 | (intron 2 75) | tttttttttttttttgagac G/A aagtctcactcttgtcccct | 6962 | | |
| NDUFS5 | 20 | (intron2 148) | ctgtagcctctgcctcccag G/A ttcaggcgattcgcgtacct | 6963 | | |
| NDUFS5 | 21 | (3′flanking region 150) | cagattcaagtggttctcct G/C cctcagcctcccaagtagct | 6964 | | |
| NDUFS5 | 22 | (intron 1 (− 10682)-(− 10681) | attataaacactaaacaaac AT/Δ gtgtggtctctttacagggg | 6965 | | |
| NDUFS5 | 23 | (intron 1 − 10267) | caagtgactaccctgaaaaa A/Δ gaagagatgaaacaaatcac | 6966 | | |
| NDUFS5 | 24 | (intron 1 − 2069) | accagacagagttcccttta C/Δ ttgttttcctgtggcaaaga | 6967 | | |
| NDUFS6 | 1 | (intron 1 26) | ggccgctgggtacaggatgc A/C ccttcctccagccgcccctc | 6968 | | |
| NDUFS6 | 2 | (intron 2 1076) | ggatcatggtggtggagagg G/A ctgtgtgtctggtgggtttg | 6969 | | |
| NDUFS6 | 3 | (intron 2 1260) | cagttgtcgagtaagtggtg T/C atagggtaagtgctctttct | 6970 | | |
| NDUFS6 | 4 | (intron 2 1413) | caaaggagctcatggcattg C/T gaatgggacatttcttccgt | 6971 | | |
| NDUFS6 | 5 | (intron 2 1568) | tggagaaggggaggtttctc T/C tagtgtggatgcggtatgct | 6972 | | |
| NDUFS6 | 6 | (intron 2 1692) | gaccgtggtgacggaggttt C/T ctgggcatcgatgggtggtt | 6973 | | |
| NDUFS6 | 7 | (intron 2 6488) | tagcttaaataattattggc A/G ttcatgttcagaatgcctga | 6974 | | |
| NDUFS6 | 8 | (intron 2 6563) | tttaaacttttattttaaat G/A tccatgaatggggtcggtat | 6975 | | |
| NDUFS6 | 9 | (intron 2 6740) | aaagatttaaacctacatat C/T tttatgcccaatcatttgat | 6976 | | |
| NDUFS6 | 10 | (intron 2 6832) | gcgagggactcattttacag A/T ggttggacacttcactgtgt | 6977 | | |
| NDUFS6 | 11 | (intron 2 7054) | ttcactgccggagcttggcc G/A tgtgaacccggagccgggct | 6978 | | |
| NDUFS6 | 12 | (intron 2 7186) | ggtcagggtcacccttgagc T/C gcgcacactaaatgacggga | 6979 | | |
| NDUFS6 | 13 | (intron 2 7225) | gagggcatcccgcgtcagtc G/A ccagtgtcgaggcgtcagca | 6980 | | |
| NDUFS6 | 14 | (intron 2 7810) | cttccactctggggcgggga C/T gctgtagaaggagcacaaag | 6981 | | |
| NDUFS6 | 15 | (intron 2 11080) | gtaactgttcagtgctttct C/T ctttggatttcatgtaaatc | 6982 | | |
| NDUFS6 | 16 | (intron 2 11657) | gggacagaacgatgtggtgg G/A gagaagagggcgtggcagag | 6983 | | |
| NDUFS6 | 17 | (intron 3 208) | cgaaaaccccctttcaactg T/C gaagtggtgggcggcatgtt | 6984 | | |
| NDUFS6 | 18 | (intron 3 1031) | ctagagtgggactgggcacc C/T ggcatgtcccctcctgggct | 6985 | | |
| NDUFS6 | 19 | (3′flanking region 270) | gcttcagagagccaaggtgg G/C tcttgaggtgcatagtgaag | 6986 | | |
| NDUFS8 | 1 | (5′untranslated region − 4 | agtgtagcctccgcctcccg A/C ttgactggcctgcttggcaa | 6987 | | |
| NDUFS8 | 2 | (intron 1 163) | aggtgcagcggggagccggc T/C ctcagggcgcatgcgccgcc | 6988 | | |
| NDUFS8 | 3 | (intron 3 123) | tctctgagcctgtttccact T/C ttaaaatgattatggtgatg | 6989 | | |
| NDUFS8 | 4 | (intron 5 − 505) | aggcaaggcaggccgggcac G/A gtggctcacgcttgtaatcc | 6990 | | |
| NDUFS8 | 5 | (3′flanking region 491) | ggccctgagctggcctgcgt C/A cagccacatcctctttcctg | 6991 | | |
| NDUFS8 | 6 | (3′flanking region 693) | ttcacttcatttgcagtgag G/A aaaccagctccgagaggtga | 6992 | | |
| NDUFS8 | 7 | (3′flanking region 1267) | ttttcccagacgtaaccgcc G/A tcagagcgtggcatggagcc | 6993 | | |
| NDUFS8 | 8 | (3′flanking region 1362) | cgctgggttctttcccttac C/T gtggtctcccaggcacttac | 6994 | | |
| NDUFS8 | 9 | (3′flanking region 1449) | tgtcagaacaggcctatggc G/A cccaaccacaagtcccccaa | 6995 | | |
| NDUFS8 | 10 | (3′flanking region 1572) | cagccccacaggcctgtgct C/A gctgtgtggggcttagggat | 6996 | | |
| NDUFS8 | 11 | (3′flanking region 783-78 | cagagaccttgacccccccc (C) atctaccatcatttccaaaa | 6997 | | |
| NDUFS8 | 11 | (3′flanking region 783-78 | cagagaccttgacccccccc atctaccatcatttccaaaa | 6998 | | |
| NDUFV1 | 1 | (intron 3 670) | ctgggtggagtggggtggca T/C ggagttgaagacccagtcct | 6999 | | |
| NDUFV1 | 2 | (intron 6 160) | tgtgccggccccagccctga C/G catgcatccctttggggacc | 7000 | | |
| NDUFV1 | 3 | (intron 9 27) | accacccttctgcgtagcac G/A gagggtgggtggcatcaagg | 7001 | | |
| NDUFV1 | 4 | (3′flanking region 1111) | tgtaggctgaggtcagcccc A/C atccagtccaaagcccaccc | 7002 | | |
| NDUFV1 | 5 | (3′flanking region 1658) | gaatgcggaagtgctctgtg G/A gcacccaccatgctccgggc | 7003 | | |
| NDUFV1 | 6 | (3′flanking region 1713) | gatctggggcggagggtaca C/T ggggctggcgctgggtgaag | 7004 | | |
| NDUFV1 | 7 | (intron 4 214) | tggtgtaaattttttttttt T/Δ gcttcaaaaatatagtattt | 7005 | | |
| NDUFV1 | 8 | (3′flanking region 772-7 | tgaactcggggttcagggtc TTC/Δ ctgtgaacactggttttcaa | 7006 | | |
| NDUFV2 | 1 | (intron 1 526) | ggaaatgctggctaaataaa C/T ggtatcaaactaactctgaa | 7007 | | |
| NDUFV2 | 2 | (intron 1 6689) | tcgttggatggtagtattgt T/G tgaacaacagaagaaattca | 7008 | | |
| NDUFV2 | 3 | (intron 1 14767) | ccaaatgcatgccagcagag C/T gtggcaggaaggtacacaag | 7009 | | |
| NDUFV2 | 4 | (coding region (Ala29Val)) | aaggaatttgcataagacag T/C tatgcaaaatggagctggag | 7010 | | |
| NDUFV2 | 5 | (intron 2 − 289) | cagaagatcttactctctaa T/G gaagctggataacacttttt | 7011 | | |
| NDUFV2 | 6 | (intron 2 − 168) | tttactttggtaatcatact T/C atcaaatgtgtgtttagaca | 7012 | | |
| NDUFV2 | 7 | (intron 4 677) | aeaccacatactatttgatt C/A tgatgagaatcacataacca | 7013 | | |
| NDUFV2 | 8 | (intron 4 2295) | tatgattcaactttcaaaag A/T gtattgtgatatgaaataga | 7014 | | |
| NDUFV2 | 9 | (intron 5 102) | caacttctgccatcttattg G/A atctgtacttacctagtaat | 7015 | | |
| NDUFV2 | 10 | (intron 7 5466) | tggtaagaggctttaagata A/C caaatgctcagctttcagga | 7016 | | |
| NDUFV2 | 11 | (intron 1 13562-13563) | tactcttaaaattaatcctt (CTT) ttattataagtatacagtct | 7017 | | |
| NDUFV2 | 11 | (intron 1 13562-13563) | tactcttaaaattaatcctt ttattataagtatacagtc | 7018 | | |
| NDUFV3 | 1 | (5′flanking region − 222) | cgccgcgcccccgccacagc G/A cccaggcgcccgcagggcac | 7019 | | |
| NDUFV3 | 2 | (5′flanking region − 111) | tggccccaagggaggcactt A/G gccctactggggatgcgcgc | 7020 | | |
| NDUFV3 | 3 | (intron 1 137) | ttgggccgctgaccccgctc C/T ctgggcccaggactgaccgc | 7021 | | |
| NDUFV3 | 4 | (intron 2 152) | tatacaagacacaagatcta T/C aacagattttagaccaaaca | 7022 | | |
| NDUFV3 | 5 | (intron 2 6304) | ttcacacatgaaggggttcc G/A aaatttttgtcaagaaagac | 7023 | | |
| NDUFV3 | 6 | (intron 2 6433) | tcgccttcgtcttcatcctc T/G tccagctcctctgattctga | 7024 | | |
| NDUFV3 | 7 | (intron 2 6563) | cctttgaaaacagagccccc C/T gagttacagtatcagcaaaa | 7025 | | |
| NDUFV3 | 8 | (intron 2 9619) | actatcttctgtgcgcatgc G/A cagagcccaccttgcagagc | 7026 | | |
| NDUFV3 | 9 | (intron 2 9858) | aggatgccagctctttaaat G/A agacatcgtttttgcttaac | 7027 | | |
| NDUFV3 | 10 | (intron 2 11673) | cttggtaggtaagcgcctgt A/G tgtgagccaagtcattcata | 7028 | | |
| GGT1 | 1 | intron 1 + 85 | ttatccagtaaggtggctcc G/A tcacctcttttcctggtggg | 7029 | | |
| GGT1 | 2 | exon 3 + 68 | gacggccaggtccggatggt G/T gtgggagctgctgggggcac | 7030 | | |
| TGM1 | 1 | exon 2 + 179 | tgccgaaatgcggcagatga C/T gactggggacctgaaccctc | 7031 | | |
| TGM1 | 2 | intron 9 + 1594 | acttaccactctgtcctctc C/T tgccaggcctcttcctgtca | 7032 | | |
| TGM1 | 3 | intron 9 + 1933 | ccgcacctctgtaccctgcc C/G ccatcctccagcagagcagc | 7033 | | |
| TGM1 | 4 | intron 10 + 54 | tcagtcatgggttctctggt C/T ccaacttcaccgctgactga | 7034 | | |
| TGM1 | 5 | intron 10 + 420 | aggaggccgggagtcaggcc A/G ccctcagaccctctggctca | 7035 | | |
| TGM1 | 6 | intron 12 + 101 | gggagtccctgggggaagcc T/G catgtagggaagcaggcctc | 7036 | | |
| TGM1 | 7 | intron 13 + 72 | ggataaggacatcagaggtg G/A gcgctaagccagcagcaggc | 7037 | | |
| TGM1 | 8 | intron 14 + 1671 | atctcttacccacaccccca C/G catggtggggaggttcctca | 7038 | | |
| TGM1 | 9 | intron 14 + 1691 | ccatggtggggaggttcctc G/A tcctaagggatccgcagagc | 7039 | | |
| TGM1 | 10 | intron 14 + 2983 | tccctgcctccctccttcag G/A gagctcagaaacaccttcaa | 7040 | | |
| TGM1 | 11 | intron 14 + 3158 | ggaaacccctcagaaccagg T/C tccaagccaaatgctttgcc | 7041 | | |
| TGM1 | 12 | intron 14 + 3816 | cagaatacaaaagtgggatg G/C gaggcaaggagtcccgttag | 7042 | | |
| TGM1 | 13 | exon 15 + 233 | ctcgaggtggagcttagccc T/C gtgccaggagcaatgggact | 7043 | | |
| TGM1 | 14 | exon 10 + 369 | ggagtcagtcttcacttgca C/A tgggggaacagatgctaata | 7044 | | |
| CYP1A1 | 1 | 5′flanking − 1061 | ccgccccgactccctccccc C/G tcgcgtgactgcgagccccc | 7045 | | |
| CYP1A1 | 2 | 5′flanking − 1035 | tgactgcgagcccccgcgcc G/A ggccggggaatgggtcggct | 7046 | | |
| CYP1A1 | 3 | 5′flanking − 1020 | gcgccgggccggggaatggg T/G cggctgggtggctgcgcggg | 7047 | | |
| CYP1A1 | 4 | 5′flanking − 947 | cgcgcctccgggccaggtgg G/A gcggggacgggccgcctgac | 7048 | | |
| CYP1A1 | 5 | intron 1 + (1326-1334) | cattcattgagaattgagcc (A)8-9 ccctggcctggatttctctg | 7049 | | |
| CYP1A1 | 6 | intron 1 − 1357 | ctggcctggatttctctgac T/C aaagagctcaatctagctgg | 7050 | | |
| CYP1A1 | 7 | intron 1 − 1590 | ccactcttcaaaaggaggta C/T atgtgacagcagctggaaat | 7051 | | |
| CYP1A1 | 8 | exon 2 + 160 | gaatccaccagggccatggg G/A ctggcctctgattgggcaca | 7052 | | |
| CYP1A1 | 9 | 3′flanking + (710-720) | caccgcgagatttccaggtc (T)10-12 gagacggagtctcactgtgt | 7053 | | |
| CYP1A1 | 10 | 3′flanking + 834 | gcctcagcctcccaagtagc C/T gggactacaggcgcctgcca | 7054 | | |
| CYP1A2 | 1 | intron 1 + 103 | gcctgggctaggtgtagggg T/G cctgagttccgggctttgct | 7055 | | |
| CYP1A2 | 2 | intron 2 + 371 | cttccctgtgttcacactaa C/T cttttccttctttgaaattg | 7056 | | |
| CYP1A2 | 3 | intron 4 + 44 | atagccaggagaagccttga G/A acccaggttgtttgttcagt | 7057 | | |
| CYP1A2 | 4 | intron 4 + 206 | aagagtgacatggggtataa G/C aggggataattcatggggca | 7058 | | |
| CYP1A2 | 5 | intron 5 + (623-648) | tgccccaggctgcctgctgc (T)22-25 catagaaaatagaaaaacat | 7059 | | |
| CYP1A2 | 6 | intron 6 + 81 | tccctgctaggaactgttta T/C ataatgaaaggaggggacct | 7060 | | |
| CYP1A2 | 7 | exon 7 + 101 | ctggccatcctgctacagca A/T ctggagttcagcgtgccgcc | 7061 | | |
| CYP1A2 | 8 | exon 7 + 295 | cggctgcctgtctccatcaa C/T tgaagaagacaccaccattc | 7062 | | |
| CYP1B1 | 1 | 5′flanking − 3669 | tgtatcctgtgaagcatcac G/A gttatccttctctgcacatg | 7063 | | |
| CYP1B1 | 2 | flanking − 3149 | tgacagcacttaccaaccta G/C ttcctctgatttttgagtca | 7064 | | |
| CYP1B1 | 3 | flanking − 1222 | gggggaagccacccccgccc G/A agcgcctccggcttccctta | 7065 | | |
| CYP1B1 | 4 | flanking − 376 | ttccgggaagcaagctcaag T/C cgcggagagggaagggaggt | 7066 | | |
| CYP1B1 | 5 | flanking − 265 | ctggggacaccgtgcggcct C/T gattggaggtggctgtgatg | 7067 | | |
| CYP1B1 | 6 | intron 1 + 129 | tgcccgcagcgttgtcccca G/A attgcaggaaccgttacgcg | 7068 | | |
| CYP1B1 | 7 | intron 1 + 379 | tgagtgtcacgccttctcct C/T tctgtccccagcatgggcac | 7069 | | |
| CYP1B1 | 8 | exon 3 + (799-800) | agcttctgggagattttttt (T) gagtcaaagacttaaagggc | 7070 | | |
| CYP1B1 | 8 | exon 3 + (799-800) | agcttctgggagattttttt gagtcaaagacttaaagggc | 7071 | | |
| CYP1B1 | 9 | exon 3 + 1284 | agtatagtggggttccatga G/T ttatcatgaattttaaagta | 7072 | | |
| CYP1B1 | 10 | exon 3 + 1398 | tcagcaaagaaaaaaaaaaa A/Δ gccagccaagctttaaatta | 7073 | | |
| CYP1B1 | 11 | exon 3 + 1468 | tctcataggttaaaaaaaaa A/Δ gtcaccaaatagtgtgaaat | 7074 | | |
| CYP1B1 | 12 | exon 3 + 1564 | ttgaataatatatgccttgt G/A taatattgaaaattgaaaag | 7075 | | |
| CYP1B1 | 13 | exon 3 + 1762 | ttgaaattctatttataata C/Δ agaatcttgttttgaaaata | 7076 | | |
| CYP1B1 | 14 | 3′flanking + (2216-2226) | agccagcctctttctttttc (T)10-12 aaaatttattcctatttcct | 7077 | | |
| CYP1B1 | 15 | 3′flanking + 2230 | tttttctttttttttttaaa A/Δ tttattcctatttccttaca | 7078 | | |
| CYP3A4 | 1 | intron 2 + (754-763) | cacaaaatgaggttgtgggg (T)9-11 acacaaaggcggaatcacat | 7079 | | |
| CYP3A4 | 2 | intron 7 + 258 | accactaataaactttctgc C/T tctatggatttgcctattct | 7080 | | |
| CYP3A4 | 3 | intron 7 + 894 | tgctgatctcactgctgtag C/T ggtgctccttatgcatagac | 7081 | | |
| CYP3A4 | 4 | exon 9 + (32-33) | ttccttcagctgatgattga (A) ctctcagaattcaaaagaaa | 7082 | | |
| CYP3A4 | 4 | exon 9 + (32-33) | ttccttcagctgatgattga ctctcagaattcaaaagaaa | 7083 | | |
| CYP3A4 | 5 | intron 10 + 12 | cccaataaggtgagtggatg G/A tacatggagaaggagggagg | 7084 | | |
| CYP3A4 | 6 | intron 10 + 459 | agacatctgacttttttttt T/Δ gaaaggtaacaatcactttc | 7085 | | |
| CYP3A4 | 7 | intron 10 + 608 | agccgtctcgaatgtctccc C/T acttcataactcctccacac | 7086 | | |
| CYP3A4 | 8 | intron 12 + 2467 | ttttttgcccattactccat A/G gagatcagaatatcactctg | 7087 | | |
| CYP3A5 | 1 | exon 1 + 69 | ggaagactcacagaacacag T/C tgaagaaggaaagtggcgat | 7088 | | |
| CYP3A5 | 2 | intron 1 + (955-956) | tgtgggtagtggaggctcca (A) cctgtcccattaacttctac | 7089 | | |
| CYP3A5 | 2 | intron 1 + (955-956) | tgtgggtagtggaggctcca cctgtcccattaacttctac | 7090 | | |
| CYP3A5 | 3 | intron 1 + 1126 | acatttttaaatgaattgat A/G tggtttaaattcattcattt | 7091 | | |
| CYP3A5 | 4 | intron 1 + 1145 | tatggtttaaattcattcat T/G tttaaaccacaattttttgg | 7092 | | |
| CYP3A5 | 5 | intron 1 + 1543 | ttcatgcgtcctggccccac C/A gtggaggtcactcaaagggc | 7093 | | |
| CYP3A5 | 6 | intron 1 + 2366 | cttatcttatatgccatact G/A caccatttgctatcaacagg | 7094 | | |
| CYP3A5 | 7 | intron 4 + 1813 | tggttctaattttactcttc G/A tgttcttcatccttgaaaat | 7095 | | |
| CYP3A5 | 8 | intron 4 + 1887 | aatgacatgaacaaggtgtg A/T ttgtgaagcaagggatattt | 7096 | | |
| CYP3A5 | 9 | intron 4 + 3384 | gagtgcttcgctatttgcct C/T aacaagaaaaagtcatttgt | 7097 | | |
| CYP3A5 | 10 | intron 4 + 3415 | agtcatttgtccacttttca T/C tgaacaatcttccttcatcc | 7098 | | |
| CYP3A5 | 11 | intron 4 + 3760 | aagataacacactggaagtc G/A cacaccaccataaaactgaa | 7099 | | |
| CYP3A5 | 12 | intron 4 + 3885 | acaattcacttcacgtggca C/T tgcaatagcgtcctctcgct | 7100 | | |
| CYP3A5 | 13 | intron 4 + 5061 | tacctacttttcaaaaaaaa A/Δ tcaccacatcatggcatccc | 7101 | | |
| CYP3A5 | 14 | intron 4 + 5316 | ccagatggctgggtctcccc A/T ctcccacccccgccccacat | 7102 | | |
| CYP3A5 | 15 | intron 9 + 77 | gttctgaaaatgtgcacgaa G/T tattccaggaagatgagaat | 7103 | | |
| CYP3A5 | 16 | intron 9 + 1791 | aaatttttattgggaaaaag C/T ctaccccatatttacttaca | 7104 | | |
| CYP3A5 | 17 | intron 12 + 1408 | atttaaataaaaaaaaaaaa A/Δ cacgagtccacaagaatttg | 7105 | | |
| CYP3A5 | 18 | 3′flanking + 542 | tggagaaaatattcatagtt T/C cattctgccttctttgaaga | 7106 | | |
| CYP3A5 | 19 | 3′flanking + 737 | atgaacactgaataaaaaat T/G gtcaattcgtcagttgattg | 7107 | | |
| CYP3A5 | 20 | 3′flanking + 804 | ttttccttttttattctttc A/C ttttcactccttttctgaat | 7108 | | |
| CYP3A7 | 1 | 5′flanking − 1680 | cccaaggaacatgtggctcc C/A ggcacatacctggcacaaca | 7109 | | |
| CYP3A7 | 2 | 5′flanking − 1191 | tagaaaatcctccacttgtc A/C aaaaggaagccatttgcttt | 7110 | | |
| CYP3A7 | 3 | intron 1 + 1173 | cccccatttcaaatacacct G/A cttagcaggttatcctaaac | 7111 | | |
| CYP3A7 | 4 | intron 1 + 1597 | tttttctgttagcctcttca T/C tgtaaccaaaagcagcatta | 7112 | | |
| CYP3A7 | 5 | intron 3 + 762 | tccagtgtctgcctattccc T/C tcttctttttttcttccctt | 7113 | | |
| CYP3A7 | 6 | intron 7 + (1060-1069) | atggtttcgttttctgttgg (T)9-10 ctacagaagtctttccattc | 7114 | | |
| CYP3A7 | 7 | intron 11 + (592-594) | taagacaaggtagggaggag AAG/Δ gaggagaattagaaaaacaa | 7115 | | |
| CYP3A7 | 8 | intron 12 + 911 | ccccctccattaacaatatc C/T tctcattttattccatttaa | 7116 | | |
| CYP3A7 | 9 | intron 12 + 1137 | gtctgtctgcagggaaaata T/Δ attcatgccttttgaaaatt | 7117 | | |
| CYP3A7 | 10 | intron 12 + 2147 | tattgtcagtaatttttttt T/Δ actttgatgctatactttct | 7118 | | |
| CYP3A7 | 11 | exon 13 + 218 | ttcatccaatgtgctgcata A/C ataatcaggcattctgtacg | 7119 | | |
| CYP3A43 | 1 | intron 1 + 3579 | tcatgctcactttttttttt T/Δ ctcaaaatgatcagtcacac | 7120 | | |
| CYP3A43 | 2 | intron 2 + 2427 | tagagggaatcttttttttt T/Δ cctttttttctctgccccag | 7121 | | |
| CYP3A43 | 3 | intron 3 + 3034 | tttttatatagctagggaga T/C tgtaaattaacaagtttcct | 7122 | | |
| CYP3A43 | 4 | intron 3 + 3433 | agtcaagataactttttttt T/Δ cataaaggaccacagtatgt | 7123 | | |
| CYP3A43 | 5 | intron 3 + 3504 | catgactcagtttccaacca T/C aacttttcattttggcatag | 7124 | | |
| CYP3A43 | 6 | intron 4 + 2767 | tagtgacttttgaaaaaaaa A/Δ ttagtaataagcaaaagcct | 7125 | | |
| CYP3A43 | 7 | exon 5 + 22 | aaaacttaaggcacttttca G/A aaatcccattggacctaaag | 7126 | | |
| CYP3A43 | 8 | intron 12 + (1585-1584) | tactttgagccctcattctc (A) ccaagtcacttcagtgtcag | 7127 | | |
| CYP3A43 | 8 | intron 12 + (1585-1584) | tactttgagccctcattctc ccaagtcacttcagtgtcag | 7128 | | |
| CYP4B1 | 1 | 5′flanking − 333 | gaaacattcacagtgcttgt A/T tgagaagacagtggttatta | 7129 | | |
| CYP4B1 | 2 | 5′flanking − 18 | gagcagctgaaggcaggtca G/T atgaaggctaggtggctgga | 7130 | | |
| CYP4B1 | 3 | intron 1 + 341 | tccaaaacctctggatagta C/T atagaagtaggcaatccatt | 7131 | | |
| CYP4B1 | 4 | intron 1 + 542 | cctatgcgtggctcaggagc C/T gtgacaccttcccaggttca | 7132 | | |
| CYP4B1 | 5 | intron 1 + 2856 | gaggactttgcacatagtag G/A tgctcagctatattgttagc | 7133 | | |
| CYP4B1 | 6 | intron 1 + (2923-2938) | caacaaattggtgtgtgtgg (GT)7-8 agaatgccagctcccagatc | 7134 | | |
| CYP4B1 | 7 | intron 1 + 6086 | tttggaatctaaagactggg G/T cacgatgctagttgtgtgac | 7135 | | |
| CYP4B1 | 8 | intron 1 + 6598 | ttttggggtgtggggagagg G/A cccatagtagggagacagct | 7136 | | |
| CYP4B1 | 9 | intron 1 + 6660 | acctaagggtgtccatcctg A/G aggagagcagtcctaggggg | 7137 | | |
| CYP4B1 | 10 | intron 1 + 7242 | ccctggtctcccttaactca T/C gctggactgttccctttgct | 7138 | | |
| CYP4B1 | 11 | intron 2 + 107 | gcctgtgtactaagtctgcg C/G agctgaggttcccaccctac | 7139 | | |
| CYP4B1 | 12 | intron 3 + 361 | atggtgtggtggtaggacca C/T ggctggtcaccagaggctgt | 7140 | | |
| CYP4B1 | 13 | intron 4 − 492 | aaaggctttcacatctaaaa C/A gtgtctcctcattttctgtc | 7141 | | |
| CYP4B1 | 14 | intron 4 − 315 | ggattacttacatatacacc A/G tgcgggggagctcaccacct | 7142 | | |
| CYP4B1 | 15 | intron 4 − 157 | ctacccaccctatcctgata T/C tccagcaggatggagggcag | 7143 | | |
| CYP4B1 | 16 | exon 5 + 22 | acaagtgggaagagaaagct C/T gggagggtaagtcctttgac | 7144 | | |
| CYP4B1 | 17 | intron 5 + 125 | cccagggagccttagcttgc G/A gggagacaggacctgctcat | 7145 | | |
| CYP4B1 | 18 | intron 5 + (267-289) | tgtctaagccaatccctcct CCT/Δ accctctgcttaacagggac | 7146 | | |
| CYP4B1 | 19 | intron 6 + 54 | gcctgggttcctcctcctgg C/T ccctctatgccccctcccat | 7147 | | |
| CYP4B1 | 20 | intron 7 + (99-100) | agctcttaagcatttccccc (TC) tttcctcagcaaatataacc | 7148 | | |
| CYP4B1 | 20 | intron 7 + (99-100) | agctcttaagcatttccccc tttcctcagcaaatataacc | 7149 | | |
| CYP4B1 | 21 | intron 8 + 114 | tcctggtttctctactgcat G/A gccctgtaccctgagcacca | 7250 | | |
| CYP4B1 | 22 | exon 8 + 139 | tgtaccctgagcaccagcat C/T gttgtagagaggaggtccgc | 7151 | | |
| CYP4B1 | 23 | intron 8 + 247 | agaaagttgtcaacaagagg C/T tgatattttgtgtgctaact | 7152 | | |
| CYP4B1 | 24 | intron 8 + 366 | tgtgggggtgaacagagctg A/G gacagctgggagagccagtt | 7153 | | |
| CYP4B1 | 25 | intron 8 + 650 | cctttgcttgtggtcagaca C/A cctgcctttctctctgggct | 7154 | | |
| CYP4B1 | 26 | intron 8 + 844 | tcatatgtgagaatcccccc C/A ccacggggtatccagacaca | 7155 | | |
| CYP4B1 | 27 | intron 8 + 1767 | tcccattccaagaatgttct G/T gttgtgttgctggcagggat | 7156 | | |
| CYP4B1 | 28 | exon 9 + 53 | tgtgcatcaaggagagcttc C/T gcctctacccacctgtgccc | 7157 | | |
| CYP4B1 | 29 | intron 9 + 652 | agtcggatgtggtcatgaac G/T ctctgtcactggcagtggtc | 7158 | | |
| CYP4B1 | 30 | intron 9 + 774 | cctggtcaccaacctctgtt C/T tgcccacaggaagcctgatc | 7159 | | |
| CYP4B1 | 31 | intron 10 + 33 | tgggctgggagatcagacag G/T gtgggggantgggacggtca | 7160 | | |
| CYP4B1 | 32 | exon 12 + 224 | ccagatggctcaggctgtga C/A ctccctgggcaccaccctcc | 7161 | | |
| CYP4B1 | 33 | exon 12 + 270 | ctgggtgtggaggagttggg G/A ccccctgccttcaggagctg | 7162 | | |
| CYP4B1 | 34 | 3′flanking + 129 | tctgtgtctcacagtcacgt G/A gtgctccaggcattcagggt | 7163 | | |
| CYP4B1 | 1 | intron 1 + (145-146) | ccaagcccctggcaacctca CA/Δ gtgattcaggctgcgccttt | 7164 | | |
| CYP4B1 | 2 | intron 1 + 193 | tttaatcagtctctctctct C/T tttcccattctaagtgctta | 7165 | | |
| CYP4B1 | 3 | intron 1 + 324 | ccctgctctacctccggcac T/C gcccgtccctgcctctccac | 7166 | | |
| CYP4B1 | 4 | intron 1 + 367 | tccctgcaggtccctgggcc G/C ttctctgggcctcaggatct | 7167 | | |
| CYP4B1 | 5 | intron 1 + 402 | ggatctcaccgtccatcccg T/C ctgccctgcaggatctccca | 7168 | | |
| CYP4B1 | 6 | exon 2 + 35 | ccctgtcctgcctgggcctc T/G ggccagtggcagcatcccct | 7169 | | |
| CYP4B1 | 7 | exon 2 + 166 | cggtgtttcccacaaccccc A/G agacggaactggttttgggg | 7170 | | |
| CYP4B1 | 8 | intron 2 + 125 | ggcagagaagcagaggaggc A/G tcttactcattcctctgctt | 7171 | | |
| CYP4B1 | 9 | intron 2 + 440 | gggccgtctcccacttccac T/C acacccgaaggcacctttct | 7172 | | |
| CYP4B1 | 10 | exon 3 + 48 | gttctgactcagctggtggc C/T acctacccccagggctttaa | 7173 | | |
| CYP4B1 | 11 | intron 3 + 701 | agactccaccccagcttggg T/A ccctttccttgacccctgtg | 7174 | | |
| CYP4B1 | 12 | intron 3 + 742 | cttcccatcgttggacgggc G/A aggctgagcagggggaatgg | 7175 | | |
| CYP4B1 | 13 | intron 3 + 1020 | gctttagctttctccatgtc G/A cttttcctatcaaggtggcc | 7176 | | |
| CYP4B1 | 14 | intron 3 + 1039 | cgcttttcctatcaagctgg C/A cttttcctcatgatgtcaac | 7177 | | |
| CYP4B1 | 15 | intron 3 + 1040 | gcttttcctatcaaggtggc C/G ttttcctcatgatgtcaacg | 7178 | | |
| CYP4B1 | 16 | intron 3 + 1920 | ccacctgtctaacctctgtt G/C ctgtttgctcatgtctgggg | 7179 | | |
| CYP4B1 | 17 | intron 3 + 1945 | ttgctcatgtctggggcgtg T/A ctctacaatggctgttatat | 7180 | | |
| CYP4B1 | 18 | intron 3 + 2621 | agcattctgtagaatgctga G/A ctgtgctcaggggttgcgga | 7181 | | |
| CYP4B1 | 19 | intron 3 + 2665 | tgttggatcgtgtaggaggc A/G tgtcaaggcatgctggaacc | 7182 | | |
| CYP4B1 | 20 | intron 6 + 194 | gggtttgaactggtgggtgt G/T ctcagagctctgtaggggac | 7183 | | |
| CYP4B1 | 21 | intron 7 + 67 | tgtgaaatgtcagatgaaag G/A acttgaacttgattaagagg | 7184 | | |
| CYP4B1 | 22 | intron 7 + 2811 | ttccaagggaaattgccatt T/G aattctcctgtaactcaggt | 7185 | | |
| CYP4B1 | 23 | intron 7 + (3096-3097) | ggggtgcgggttgggggggg (G) ttactgccttctctccagga | 7186 | | |
| CYP4B1 | 23 | intron 7 + (3056-3057) | ggcgtgggggttgggggggg ttactgccttctctccagga | 7187 | | |
| CYP4B1 | 24 | intron 8 + 145 | ggtgctgtctaccttcgggt G/A ctgaagcagcccagagaccc | 7188 | | |
| CYP4B1 | 25 | exon 9 + 44 | ctctcctgggtcctgtacca C/T cttgcaaagcacccagaata | 7189 | | |
| CYP4B1 | 26 | exon 11 + 48 | gaacccatcacaacccagct G/A tgtggccggaccctgaggtg | 7190 | | |
| CYP4B1 | 27 | intron 12 '108 | tggtccaagttccagctctc C/T ttccctcacctcctctggag | 7191 | | |
| CYP4B1 | 28 | intron 12 + 285 | gcatggggatccaggcacgg A/T tacccccttctctattcctc | 7192 | | |
| CYP4B1 | 29 | exon 13 + 238 | aagtgaagcctagaattacc C/A taagaccctgttccacagtc | 7193 | | |
| CYP4B1 | 30 | exon 13 + 342 | tgtgcgtgaatgttcatggc G/A gccctattcacagtagccaa | 7194 | | |
| CYP4B1 | 31 | exon 13 + 863 | tagtgtactgtccttttata T/C gaaatttccagaacaggcca | 7195 | | |
| CYP4B1 | 32 | exon 13 + 707 | aaatgttccggacctagata G/C tgacgaaggtagcacgacac | 7196 | | |
| CYP4F3 | 1 | intron 2 + 258 | cattaatgcacctctgcggg G/T ctcttgggcagggggttggg | 7197 | | |
| CYP4F3 | 2 | intron 2 + 916 | ttagggacatgtcctgagtc C/T acactgctccccacaaacct | 7196 | | |
| CYP4F3 | 3 | intron 2 + 3417 | atccaggtctcacacagtgt C/T acttcctctcttggctttag | 7198 | | |
| CYP4F3 | 4 | intron 2 + 4090 | gagagcatgaattgggtcct G/A tgtctttctctccagattca | 7200 | | |
| CYP4F3 | 5 | intron 3 + 89 | tctgctgcctccagcgggtc G/A cgtgcccatgtgcagacagg | 7201 | | |
| CYP4F3 | 6 | intron 3 + 243 | tcaagtctgctgtacggcta C/T gtcttgtcacctgtatattt | 7202 | | |
| CYP4F3 | 7 | intron 3 + 502 | aggtctgggacccagggtcc G/C taagtgaactgtctgagaca | 7203 | | |
| CYP4F3 | 8 | intron 3 + 755 | ttttgtggccatgtcaggac A/T tgtgaacacatgtcagtgtc | 7204 | | |
| CYP4F3 | 9 | intron 3 + 855 | gggacagacagggtgtccta G/A gcccttgtgaaggcattctg | 7205 | | |
| CYP4F3 | 10 | intron 3 + 970 | cctgacatagctcctacgtg C/T catgttaggcagtgtcattg | 7206 | | |
| CYP4F3 | 11 | intron 6 + 122 | gaggagttgttatacctgat C/T gttgaaggactggtatgaat | 7207 | | |
| CYP4F3 | 12 | exon 7 + 159 | ggtgcacgacttcacagatg C/A cgtcatccaggagcggcgcc | 7208 | | |
| CYP4F3 | 13 | intron 7 + 2107 | caggttgccagtgatttttt T/Δ ctcagaaagttttcatcaag | 7209 | | |
| CYP4F3 | 14 | intron 7 + 2285 | gaccaagaagggtctaggag T/A gcaagatgggcttgggtttc | 7210 | | |
| CYP4F3 | 15 | intron 8 + 132 | cctcaatgcaaggttgctgt A/C caccctcgggtgctgaagca | 7211 | | |
| CYP4F3 | 16 | exon 9 + 59 | taccaccttgcaaagcaccc G/A gaataccaggagcgctgtcg | 7212 | | |
| CYP4F3 | 17 | intron 9 + 13 | attgaatggtgagtgcaggt G/A ctggtgccctgttcctgagc | 7213 | | |
| CYP4F3 | 18 | intron 9 + 36 | ggtgccctgttcctgagcct G/C tctcattggctctgttcccc | 7214 | | |
| CYP4F3 | 19 | intron 9 + 167 | acccatcctgactgtctggg C/G aaaggttataggcccttagg | 7215 | | |
| CYP4F3 | 20 | intron 9 + 369 | tccctaattcctacccttcc G/A tccagtccagggatttataa | 7216 | | |
| CYP4F3 | 21 | intron 9 + 458 | tcattcatccatccagtcat T/C gttcagcaaatactctcata | 7217 | | |
| CYP4F3 | 22 | intron 10 + 46 | ctcctgggtaggaagagggg A/C ccctcaggcagggagcattg | 7218 | | |
| CYP4F3 | 23 | intron 10 + 63 | gggcccctcaggcagggagc C/A ttgtcctgactgcccccttc | 7219 | | |
| CYP4F3 | 24 | intron 11 + 14 | ccctgaggtgcgggcccccc C/G tctctgtttttgtccattcc | 7220 | | |
| CYP4F3 | 25 | intron 11 + 84 | gatcaggagaatccaacatc G/A cctccctccaagacacacac | 7221 | | |
| CYP4F3 | 26 | intron 11 + 113 | caagacacacaccactgtct T/C tccaaggctgccggactggg | 7222 | | |
| CYP4F3 | 27 | intron 11 + 164 | cggcaacccttcttggtctc T/G cctccaggtctatgacccct | 7223 | | |
| CYP4F3 | 28 | intron 11 + 168 | ggcaacccttcttggtctcg T/C ctccaggtctatgacccctt | 7224 | | |
| CYP4F3 | 29 | intron 12 + 156 | gaaaaggcccacagagtagg G/A ttgggttggtcctagaagga | 7225 | | |
| CYP4F3 | 30 | intron 12 + 253 | gagctcggctaggctcgcag T/G atatgcaagcccacatgggg | 7226 | | |
| CYP4F3 | 31 | intron 12 + 346 | tggcggccccaggccaggcc A/C ccggcgggatggggccagga | 7227 | | |
| CYP4F8 | 1 | 5′flanking − 61 | accatgtttacccatcattg G/T tcctggagctccccagcccc | 7228 | | |
| CYP4F8 | 2 | exon 1 + 67 | gtggcagcatccccgtggct G/T ctcctgctggtggtcggggc | 7229 | | |
| CYP4F8 | 3 | intron 1 + 707 | tacgcagcaggtattcacca T/G tatttccacattatccactg | 7230 | | |
| CYP4F8 | 4 | intron 1 + 857 | acaccccctaccctcacatc G/A tgacacagctgggccagaag | 7231 | | |
| CYP4F8 | 5 | intron 1 + 907 | tgccatctccaccctccccc G/A tgcaggggcatcttctttat | 7232 | | |
| CYP4F8 | 6 | intron 2 + 668 | tgtggcacttccaccatatg T/C tcattgccctcttgctccag | 7233 | | |
| CYP4F8 | 7 | intron 2 + 818 | gccacagagaccatggctca G/A gccccaaaatgctgagtgac | 7234 | | |
| CYP4F8 | 8 | intron 2 + 1079 | tatgcttgggtgttgcagaa C/T atgttggaccatgtaggagc | 7235 | | |
| CYP4F8 | 9 | intron 2 + 1194 | ccggtcccctttatgccccc C/A accctcctttcttcttctgc | 7236 | | |
| CYP4F8 | 10 | intron 5 + 45 | aacatgggatggagtggggg G/T gtgggtgtggggagagcaaa | 7237 | | |
| CYP4F8 | 11 | exon 8 + (19-20) | ggccatgacaccacggccag (GCCAG) tggccgctccggggccttgt | 7238 | | |
| CYP4F8 | 11 | exon 8 + (19-20) | ggccatgacaccacggccag tggcctctcctgggtcttgt | 7239 | | |
| CYP4F8 | 12 | intron 8 + 222 | tttatttccccactaacttg C/G tatgcaagcttagtaaaatc | 7240 | | |
| CYP4F8 | 13 | intron 8 + 334 | cttggagaattaacggcaaa A/T accgcaatgacttttggacc | 7241 | | |
| CYP4F8 | 14 | intron 8 + 1999 | ttctaagcacatttactctc T/C cgctcttagctatgatctag | 7242 | | |
| CYP4F8 | 15 | intron 8 + 4184 | caggagggccgcgtatgctc C/T cgggacaattgttgggtgtt | 7243 | | |
| CYP4F8 | 16 | exon 9 + 119 | acgtggtgctcccagacagc C/T gagtcatccccaaaggtgcc | 7244 | | |
| CYP4F8 | 17 | intron 11 + 282 | gggttgggggttccgggcct G/C gttcctggcgcagtggggcc | 7245 | | |
| CYP4F8 | 18 | intron 11 + 340 | tgcagtcagaccttccacct C/T ggcccccaggaactgcatcg | 7246 | | |
| CYP4F8 | 19 | 3′flanking + 35 | atcacctacctttgcaccaa T/C taccttttcagacccccggt | 7247 | | |
| CYP4F8 | 20 | 3′flanking + 83 | ctgtgttggcccctgtgcct G/C agtcccgcggatggccagta | 7248 | | |
| CYP4F8 | 21 | 3′flanking + 90 | ggcccctgtgcctcagtccc A/G cggatggccagcagggggcg | 7249 | | |
| CYP27A1 | 1 | intron 1 + 295 | aggagggagctgtcttggga A/G gagagtggcagaggcaaatg | 7250 | | |
| CYP27A1 | 2 | intron 1 + 17503 | cagtgcataaagcctctgat C/T ctccttagagaaggagggac | 7251 | | |
| CYP27B1 | 1 | intron 6 + 173 | cagcccctagcctcatcttg C/T tgtctccattttgtgctttg | 7252 | | |
| CYP27B1 | 2 | intron 8 + 113 | atataagacctggtagaatg A/C atcttctgaaatatgataag | 7253 | | |
| CYP27B1 | 3 | 3′flanking + 1081 | taccctggaatcagtgatga G/C aattctgcccatccgtactc | 7254 | | |
| AADAC | 1 | exon 1 + 29 | attaaagtacactattcagg C/T atatcatgtaggtttactct | 7255 | | |
| AADAC | 2 | intron 1 + 138 | gcggtggcctttgacaatgt G/A ttacttagaaatgttgtttg | 7256 | | |
| AADAC | 3 | intron 1 + 142 | tggcctttgacaatgtgtta C/T ttagaaatgttgtttgtttt | 7257 | | |
| AADAC | 4 | intron 1 + 1033 | ttccagcagagacaccaaca A/G gtaaaaacaccccagctaca | 7258 | | |
| AADAC | 5 | intron 1 + 1253 | tttttttccctcatatttgc T/C gtctgtgctacaatatgtga | 7259 | | |
| AADAC | 6 | intron 1 + 1366 | ctctggtagccttttaatta A/G ttaattcattcatttactta | 7260 | | |
| AADAC | 7 | intron 1 + 1369 | cggtagccttttaattaatt A/C attcattcatttacttacat | 7261 | | |
| AADAC | 8 | intron 1 + 2501 | ggttacagaaagaatggtgg C/A ttggccaaaaaatgataggg | 7262 | | |
| AADAC | 9 | intron 2 + 46 | tgtcactgaggtagttcgca A/G acattttactaagtcttcag | 7263 | | |
| AADAC | 10 | intron 2 + 1971 | aaatgagagttaagtaggag A/C attttcttttatttttgtgc | 7264 | | |
| AADAC | 11 | intron 2 + 1988 | gagaattttctttcatcttt A/G tgcaggagaaatacaaacaa | 7265 | | |
| AADAC | 12 | intron 2 + 2341 | aggtgccttctctattgtcc C/T acgcagacttaggtgatcct | 7266 | | |
| AADAC | 13 | intron 2 + 2546 | gtctgacacagaaggatcaa T/A ggcaaaatgtgcaagacaaa | 7267 | | |
| AADAC | 14 | intron 2 + 2609 | taggaggttcactgggaaac T/C tgaattccactgagtcatga | 7268 | | |
| AADAC | 15 | intron 2 + 2663 | tataaatacagtgttaaatt T/C gtctctcgtatcttaaggta | 7269 | | |
| AADAC | 16 | intron 4 + 605 | tgtgtcagtaaaatattata T/C taagtaggtgaatgagatca | 7270 | | |
| AADAC | 17 | intron 4 + 621 | tatattaagtaggtgaatga G/T atcatgtaattgtgagacta | 7271 | | |
| AADAC | 18 | intron 4 + 679 | ttagagattcagacgaattc A/G tctaatcttcgatggtgtat | 7272 | | |
| AADAC | 19 | intron 4 + 1680 | gttaaaatgtggataaatac C/T acaatttgcaaaatatttgg | 7273 | | |
| AADAC | 20 | intron 4 + 1748 | atttagaagttctatacatc T/C tttatagtatattacacact | 7274 | | |
| AADAC | 21 | intron 4 + 1771 | tatagtatattacacacttc G/A aaaacacaaaattatttttt | 7275 | | |
| AADAC | 22 | exon 5 + 238 | caagtcatctcttcaaattt A/G tcactgtggtactttgggga | 7276 | | |
| AADAC | 23 | exon 5 + 678 | ttagaaattggtctttctta A/G aatggtctagttaagttcca | 7277 | | |
| AADAC | 24 | 3′flanking + 208 | aatgctaaaaaaaaaaaaaa A/Δ cacagtgtgtttagtgaatt | 7278 | | |
| CES1 | 1 | 5′flanking − 983 | tatttccttagccagcggta T/C cacagtgtgtttagtgaatt | 7279 | | |
| CES1 | 2 | 5′flanking − 814 | tcacattgccttgacatcac A/C cctactgctcctccacccta | 7280 | | |
| CES1 | 3 | 5′flanking − 248 | agtcctgcaagggtgacacc G/Δ ttatgccacaagcagttggg | 7281 | | |
| CES1 | 4 | intron 1 + 22 | tgagtccttctgaagtcaaa T/Δ atgcggggcactttttgaaa | 7282 | | |
| CES1 | 5 | intron 1 + 30 | tctgaagtcaaatatgcggg G/T cactttttgaaatccttgtt | 7283 | | |
| CES1 | 6 | intron 1 + 1662 | aagggaatccctgacctgag C/A atgaccagcccagtggtttc | 7284 | | |
| CES1 | 7 | intron 1 + 1726 | cctccctgaagtcctcagca A/C tcttagctggttcctcgccc | 7285 | | |
| CES1 | 8 | intron 1 + 2716 | tgcttccaaggaagttcatc T/G cagtattatttgtaattagc | 7286 | | |
| CES1 | 9 | intron 1 + (2747-2749) | tgtaattagcaacaacaaca AAA/Δ gaaaagaagctaaatattga | 7287 | | |
| CES1 | 10 | intron 1 + 3288 | ttatttgtccattaaagaaa A/Δ ctcaagcgcttagcctggca | 7288 | | |
| CES1 | 11 | intron 1 + 3681 | gagaatatgggacacccctt T/C ttcatcctctcatccagcat | 7289 | | |
| CES1 | 12 | intron 1 + 3818 | tccttcttgcatttattttt A/G gctggatgtttttatgcctc | 7290 | | |
| CES1 | 13 | intron 1 + 3880 | aaccagctcaatgggttagg C/A aggacattgatcgtcatccc | 7291 | | |
| CES1 | 14 | intron 2 + 74 | gagtcaaggcagtcccctga T/C gggctgatcctttgctctgg | 7292 | | |
| CES1 | 15 | intron 2 + 552 | atggaaggtgtgtccattca C/A cctggccaagctgggaagaa | 7293 | | |
| CES1 | 16 | intron 2 + 885 | cagtattttagatggtaaag T/C attatgatgtaatatattgt | 7294 | | |
| CES1 | 17 | intron 2 + 2001 | ttggcatgtcagggctgcaa C/A actcatgtagaaatcactcc | 7295 | | |
| CES1 | 18 | intron 3 + 2119 | cgctgagtgcatgaatagtc T/C aggcttgagggtgatgggag | 7296 | | |
| CES1 | 19 | intron 4 + 127 | taaggcatccaagccccttc C/A taattggacactacctaccg | 7297 | | |
| CES1 | 20 | intron 4 + 347 | tctgtcatgacacttagcag T/C cagcccagcaggtgaaggtt | 7298 | | |
| CES1 | 21 | intron4 + (1984-1985) | gtggtcctgaaggtcctgca (C) tgacatctctgctccccacc | 7299 | | |
| CES1 | 21 | intron 4 + (1984-1985) | gtggtcctgaaggtcctgca tgacatctctgctccccacc | 7300 | | |
| CES1 | 22 | intron 5 + 766 | gaggtgggcagagggtcagc T/C cactactggattcctcagtc | 7301 | | |
| CES1 | 23 | intron 5 + 828 | ggagtagatctagcctggaa T/C agcgagtgagtcactgaccc | 7302 | | |
| CES1 | 24 | intron 5 + 828 | gtagatctagcctggaatag C/T gagtgagtcactgaccccac | 7303 | | |
| CES1 | 25 | intron 8 + 868 | ctcctgagcatgaactctcc T/A cccctccactctgctgtcag | 7304 | | |
| CES1 | 26 | intron 7 + 68 | acttcttcatttcagctgtc C/G tcttgcccagcgacggtttc | 7305 | | |
| CES1 | 27 | intron 7 + 681 | cctccaaaatcaacaatcca A/G ttatcgcctgtctgctagtt | 7306 | | |
| CES1 | 28 | intron 7 + 885 | aggaactatccaaagagaaa T/C acattcatatacttcgcagg | 7307 | | |
| CES1 | 29 | intron 7 + 2101 | gtcgtgtaaactgaaaatct C/G aggagttgatggcttcaggc | 7308 | | |
| CES1 | 30 | intron 7 + 2470 | atatagatatacgaattcac C/A gagtgatgcgggaacaacct | 7309 | | |
| CES1 | 31 | intron 8 + 128 | cgtgtttgtttctgaggccc A/G gagaggggtagtgactcacc | 7310 | | |
| CES1 | 32 | intron 0 + 2618 | cctgatggcaacacatgagt T/C gggctctctctaatctgtga | 7311 | | |
| CES1 | 33 | intron 0 + 2665 | aaaaattattcatcaaaggt C/A aaacctaaaattaagacatg | 7312 | | |
| CES1 | 34 | intron 8 + 3780 | ccatggcgcacggccatgcc C/A gtctatggtactggtctcac | 7313 | | |
| CES1 | 35 | intron 8 + 3791 | cgcatggccatgccggtcta T/C ggtactggtctcaccctcag | 7314 | | |
| CES1 | 36 | intron 10 + 222 | gtgggctggagaagctgcat C/T gctcaccaggggctggtggt | 7315 | | |
| CES1 | 37 | intron 10 + 230 | gagaagctgcatcgctcacc A/G ggggctggtggtcacttttt | 7316 | | |
| CES1 | 38 | intron 11 + 1177 | ctagcaggtgccctgacaca C/G ctttgcacaggaaggggcag | 7317 | | |
| CES1 | 39 | intron 11 + 1311 | gccctatgctctgcgtctga A/G ctatatatagacttcccatc | 7318 | | |
| CES1 | 40 | intron 11 + 2029 | ttctcatttgggatgctaag A/G ttaaaaattagcataacact | 7319 | | |
| CES1 | 41 | intron 11 + 2029 | catttgggatgctaagatta A/G aaattagcataacacttcca | 7320 | | |
| CES1 | 42 | intron 11 + 2317 | cattcacaaaagctctttct T/C ctatggttggctctgagttt | 7321 | | |
| CES1 | 43 | intron 11 + 3887 | caaatatttggctctaattc C/T gcttccacctcagacagctg | 7322 | | |
| CES1 | 44 | intron 12 + 2311 | gcgcctctgggcatctcact C/A tgcatgcttaggcgccttgc | 7323 | | |
| CES1 | 45 | intron 12 + 2331 | gtacatgcttaggcgccttg C/G ggctctgttgtttttcagaa | 7324 | | |
| CES1 | 46 | 3+ flanking + 71 | aacggtgatgaaagaggcga T/C gtgagaaggaaggtggcttt | 7325 | | |
| CES1 | 47 | 3′flanking + 362 | ttgcatggcacttactgacc C/A ttgcacaggcctgcaacacc | 7326 | | |
| CES1 | 48 | 3′flanking + 581 | atttctggattctgttagta C/T gtagaaagctctaaagcatg | 7327 | | |
| CES1 | 49 | 3′flanking + 1348 | aaatctgctgctgggagaga G/C agcaaagcatgcagatcaac | 7328 | | |
| CES2 | 1 | intron 1 + (1303-1321) | caacagtgacttgtctctacc (A)17-19 gtcaagcatggtggcagaca | 7329 | | |
| CES2 | 2 | exon 5 + 60 | ggacccagtggctccactac C/A ctgggtccagcagaatatcg | 7330 | | |
| CES2 | 3 | exon 12 + 256 | agcctgctgtgcccacacac A/G cccactaaggagaaagaagt | 7331 | | |
| CES2 | 4 | 3′flanking + (155-172) | acacagtgagaccccttctc (A)16-18 gagagagtgtgtgattagaa | 7332 | | |
| CES2 | 5 | 3′flanking + (173-178) | tcaaaaaaaaaaaaaaaaaa (GA)4-6 gtgtgtgattagaagctaaa | 7333 | | |
| CES2 | 6 | 3′flanking + 377 | ggtcaaggtgagcagaacac C/G tgaggacaggagtttgagac | 7334 | | |
| GZMA | 1 | 5′flanking − 424 | cctcagcttgcacttggcct A/G ctaattcttatataacccaa | 7335 | | |
| GZMA | 2 | 5′flanking − 134 | agcctgcctgctggcagtga C/G ccatcatccaccattctgac | 7336 | | |
| GZMA | 3 | intron 1 + 1947 | gacataaggttctctctatc A/T gcatgtatggtttgccttgt | 7337 | | |
| GZMA | 4 | intron 2 + 958 | gactgcgtgaccaggtagaa C/T tagcctcagcatggaagggt | 7338 | | |
| GZMA | 5 | intron 2 + 1025 | gttggtgtagtttatactag C/A ttatgaatgatagccttaat | 7339 | | |
| GZMA | 6 | intron 4 + 105 | tgccaagttgcagggtgggg C/G aggactcacaatagtgcatc | 7340 | | |
| GZMA | 7 | intron 4 + 696 | atagagccttacctgaagaa A/G ggtgtgcagtatgcatggtt | 7341 | | |
| GZMA | 8 | intron 4 + 1141 | ctgttcagggaggatcccgg C/A ttccaacatggttctttatt | 7342 | | |
| GZMB | 1 | 5′flanking − 961 | tgtttcgcaaatgtttactg T/C gagcctgttatgtgctgagc | 7343 | | |
| GZMB | 2 | 5′flanking − 263 | ggctgataccacatcctaca A/G ttcacttcataggcttgggt | 7344 | | |
| GZMB | 3 | exon 2 + 109 | gtgcggtggcttcctgatac A/G agacgacttcgtgctgacag | 7345 | | |
| GZMB | 4 | intron 2 + (242-243) | cgcgggcatactttggcata (A) gaatacaaactgaagcaatt | 7346 | | |
| GZMB | 4 | intron 2 + (242-243) | cgcgggcatactttggcata gaatacaaactgaagcaatt | 7347 | | |
| GZMB | 5 | intron 4 + 131 | atttctctctggaaagagaa G/A aggggactagactgagctgg | 7348 | | |
| GZMB | 6 | intron 4 + 102 | gggcctctgcaaacttacca C/A gaggcttatggtggatggtg | 7349 | | |
| GZMB | 7 | 3′flanking + 54 | attctcaggcaccacatctg C/T gctatgcaggccaatgacac | 7350 | | |
| GZMB | 8 | 3′flanking + 184 | tccacaccagtttctccagg C/T cctgcccttctgccaaggct | 7351 | | |
| GZMB | 9 | 3′flanking + 286 | ccactttggtcctggggctt T/A gggtaaacttcttacctcct | 7352 | | |
| GZMB | 10 | 3′flanking + 406 | ctgagctcaaggctcagctc C/A tcctccagccctttggctgc | 7353 | | |
| ESD | 1 | 5′flanking − 333 | gtcttgggacagaggagttg C/A gggagttgaaattaggccct | 7354 | | |
| ESD | 2 | intron 1 + 603 | gtcatttctgatggggtcat C/T agggaaatgggattgagcgc | 7355 | | |
| ESD | 3 | intron 1 + 698 | tgtgtggtagaagaagcatt C/T taagcactacgtgaattaac | 7356 | | |
| ESD | 4 | intron 1 + 1864 | gctttcatgcaggattgatc C/G tagtgggatgtattaggaag | 7357 | | |
| ESD | 5 | intron 1 + 2389 | ttttgggaacacctgtctag G/A ttgttaagagccagtggaat | 7358 | | |
| ESD | 6 | intron 2 + 22 | taaacttgttttattgttta T/C atgttactctgaacattgaa | 7359 | | |
| ESD | 7 | intron 2 + 589 | taaaattagtatctctctct G/A taagttcattatttaagata | 7360 | | |
| ESD | 8 | intron 2 + 1499 | tagaaaaatgtgtatcacac C/T gtaagtgttcagtaatgtta | 7361 | | |
| ESD | 9 | intron 3 + 92 | ctttatctagatattatagt C/A cctcattttacttttaaact | 7362 | | |
| ESD | 10 | intron 3 + 422 | gtaaagagattaaacacaca C/T gcacacatacatatacctat | 7363 | | |
| END | 11 | intron 3 + 581 | agaaaacctgagaaatgaea C/T aatttatttaaagccatagt | 7364 | | |
| ESD | 12 | intron 3 + 2270 | gccagtaattacatgtagcc C/A tttacatcaaattagctaat | 7365 | | |
| ESD | 13 | intron 3 + 2951 | taatgaaagtaaatgtttca A/G cttccctaacaaaagttgaa | 7366 | | |
| ESD | 14 | intron 3 + 3503 | aaatgtcagaaattttttgt C/A ccgtcagtcatcaacaagaa | 7367 | | |
| ESD | 15 | intron 3 + 3097 | aaggagcatacagaaaactt C/G ccatgatggggcctttgtgg | 7368 | | |
| ESD | 16 | intron 4 + 2616 | tctaatagtccccagtatta A/G tttacatcaaattagctaat | 7369 | | |
| ESD | 17 | intron 5 + 392 | tcttttttcatctctgttaa C/T atcaaccatacagttaaaca | 7370 | | |
| ESD | 18 | intron 7 + 107 | ttagtattggaactaaactt T/C tctagtgttgagaactttgg | 7371 | | |
| ESD | 19 | intron 8 + 1091 | aaattctaactaattaaagg G/T ttcatcctttagtaactaga | 7372 | | |
| ESD | 20 | intron 8 + 1652 | tataaacttgtggttaatga A/G tatatatgaataagaatatt | 7373 | | |
| ESD | 21 | intron 8 + 2048 | agaaggaaaaaggccatttt G/C ttaagaatccctgagatatg | 7374 | | |
| ESD | 22 | intron 9 + (1523-1526) | ctgccaacaaagtctgaaaa (TC)2-3 aagtttgttataaaaacagc | 7375 | | |
| ESD | 23 | intron 9 + 3468 | atagaaggagaggctatact A/G cctccttaagtctcaggacc | 7376 | | |
| ESD | 24 | intron 9 + 3362 | actaaggataaaaatatggc A/G tactcagtcacattggaact | 7377 | | |
| ESD | 25 | intron 9 + 5292 | aggccttaatgacatatttc T/C cctcacataaagatacaaca | 7378 | | |
| ESD | 26 | intron 9 + 5298 | taatgacatatttcccctca A/G ataaagatacaacatgcttt | 7379 | | |
| ESD | 27 | 3′flanking + 798 | tatggtaactgaagaaaatg A/G cattaagttcctaaagttat | 7380 | | |
| CEL | 1 | 5′flanking − (611-617) | tggatcaaggcaaataattt (A)6-7 ggaaattatttgaagaaaaa | 7381 | | |
| CEL | 2 | intron 1 + 20098 | atctctaccaaggtaccaat T/C ccttaaggaagatgttaatt | 7382 | | |
| CEL | 3 | intron 1 + (20911-20924) | taatgacattaatacttagc (A)13-15 ctgaatatgactaaaactga | 7383 | | |
| CEL | 4 | intron 1 + 22374 | ttaagttaaatgtaaacagc A/G cctttgcacactattcagtg | 7384 | | |
| CEL | 5 | intron 1 + (22460-22469) | ttaattttttagttaggttg (T)9-10 ctcttttattttatcacatg | 7385 | | |
| CEL | 6 | intron 1 + 24205 | agaatttgagtctattcttg T/C gtgccttctgactacatcct | 7386 | | |
| CEL | 7 | intron 1 + (24404-24417) | gcaagttttaactgaattac (A)11-14 gcagatgataatcattctat | 7387 | | |
| CEL | 8 | intron 1 + 26983 | tagattttgatgagtttgag T/G ttttttttttttttttccaa | 7388 | | |
| CEL | 9 | intron 1 + (26983-26999) | tagattttgatgagtttgag (T)14-17 ccaaaagggtgggggttgtt | 7389 | | |
| CEL | 10 | intron 1 + (32166-32174) | tcaactttgctggtaaccag (A)8-9 gaaaagccactattaatatc | 7390 | | |
| CEL | 11 | intron 1 + 37217 | aaatttgtaagtgaatgtta T/C ataaaaatctgtaacaatta | 7391 | | |
| CEL | 12 | intron 1 + 37685 | taattcaaatggattaatca T/A tgataatttctatttttaaa | 7392 | | |
| CEL | 13 | intron 1 + 38032 | caggcctaataaatgaaatg T/C tcactactgttgccaacacc | 7393 | | |
| CEL | 14 | intron 1 + 38133 | attcgggagtcctgtctgcc A/G tttgtagaaaccatccagct | 7394 | | |
| CEL | 15 | intron 1 + 38169 | cagctcatcttcctactctt A/T gtgttggggatttttgcccc | 7395 | | |
| CEL | 16 | intron 1 + 38544 | gtttctgtcaactctccaga T/C ataaaatcaaatgctcttcc | 7396 | | |
| CEL | 17 | intron 1 + (38642-38643) | caatttcttcacaatacctg (G) attgctgccaggcagcaata | 7397 | | |
| CEL | 17 | intron 1 + (38642-38643) | caatttcttcacaatacctg attgctgccaggcagcaata | 7398 | | |
| CEL | 18 | intron 1 + 49429 | gaaagagaaacttgtgtccc A/G gaaacttgtgtaagtatgcc | 7399 | | |
| CEL | 19 | intron 1 + 49038 | ttgaaactgcactgacacta A/G tttaaattttacaagtaatt | 7400 | | |
| CEL | 20 | intron 1 + 49040 | gaaactgcactgacactaat T/C taaattttacaagtaatttt | 7401 | | |
| CEL | 21 | intron 1 + 49256 | acatgagaaaagaaatggag C/A taagtttaaaaacagaatga | 7402 | | |
| CEL | 22 | intron 1 + 49386 | aatagttctcagtagatatt C/A ttttacctatatttagtata | 7403 | | |
| CEL | 23 | intron 1 + 50786 | tactttgtcctcaccaatgc C/A tattcttcccctaaacagat | 7404 | | |
| CEL | 24 | intron 1 + 50977 | ctccagccagagaggacaga T/C agctgagtttctgtttgcct | 7405 | | |
| CEL | 25 | intron 1 + 51150 | agcacnatggactgtttttg C/G agtcctcctctttattatgc | 7406 | | |
| CEL | 26 | intron 1 + 52333 | tcagtcaaacttaaaggctc A/G gagatctattaatgcttatg | 7407 | | |
| CEL | 27 | intron 1 + 52589 | gtgtcagcatctgtagagta C/A gggagggtgttgaaagaaaa | 7408 | | |
| CEL | 28 | intron 1 + 55838 | tctcgcaggtaaatgaggat C/A gaatactttaaatacaaatc | 7409 | | |
| CEL | 29 | intron 1 + 56828 | ataagtttggaaaatttgtg C/G taaaatacactaaatatttc | 7410 | | |
| CEL | 30 | intron 1 + 58738 | tggtggagaaatagcttata C/A tgctggtcaaactgtcccat | 7411 | | |
| CEL | 31 | intron 1 + 59358 | cagaaattgtactttaaaat A/G cgaactgcaagcactgcagt | 7412 | | |
| CEL | 32 | intron 1 + 59359 | agaaattgtactttaaaata C/T gaactgcaagcagtgcagtc | 7413 | | |
| CEL | 33 | intron 1 + 59464 | acccagaaaggagcatgtcc C/G tttgtcatttgtggtgaaac | 7414 | | |
| CEL | 34 | intron 1 + 61340 | aaaaaaaacttcaaaatact C/G caatatccaaagttggtaca | 7415 | | |
| CEL | 35 | intron 1 + 62739 | cagtctttaggcacaaagag A/G caaagagtcttctcatctct | 7416 | | |
| CEL | 36 | intron 1 + (64764-64779) | ctgggttgtttctcataaag (T)14-17 aatgtgggatagtggtataa | 7417 | | |
| CEL | 37 | intron 1 + 65243 | tttcaggcttctggacagaa T/C agtattatgataaaagctat | 7418 | | |
| CEL | 36 | intron 1 + 65269 | tatgataaaagctattaata T/A ttaggaagattcctctgact | 7419 | | |
| CEL | 39 | intron 1 + 65325 | aattagaaaagcaagttttg C/G gggggggggtccaaaacaaa | 7420 | | |
| CEL | 40 | intron 1 + (65326-65334) | attagaaaagcaagttttgg (G)7-9 gggggggggtgcaaaacaaa | 7421 | | |
| CEL | 41 | intron 1 + 65524 | cacacccataaccaccagtt A/G gttgcctctcctgagccatg | 7422 | | |
| CEL | 42 | intron 1 + 65869 | cagagtaacattcgggctcc A/T actgtcctttcttatacaga | 7423 | | |
| CEL | 43 | intron 1 + 65910 | aaggctgtctcctgctgttt C/G tggatccaaggcctgctgaa | 7424 | | |
| CEL | 44 | intron 1 + 66800 | cctctctttccatccctgac C/A gagcatattcactgtcctat | 7425 | | |
| CEL | 45 | intron 1 + (66226-66235) | tctgtttttgaaaaaacaag (A)9-10 tctctccctgcctttggaaa | 7426 | | |
| CEL | 46 | intron 1 + 81816 | aatgttgccttactttccac A/G tatttccagaagccctgatc | 7427 | | |
| CEL | 47 | intron 1 + 83480 | tatgactgtcaggaagaaaa T/C tagaattatctttgtatcct | 7428 | | |
| CEL | 48 | intron 1 + 83732 | ggggtttgaaatctatggag T/C catttacttctttttaaaaa | 7429 | | |
| CEL | 49 | intron 1 + 85507 | ctggaaagaaattttgtgta A/T ctgcattatttaaatgttag | 7430 | | |
| CEL | 50 | intron 1 + 87299 | caatggtcattatatcttcc G/A tgtgtgaagaaagtcgacaa | 7431 | | |
| CEL | 51 | intron 1 + 87426 | caacaggataatcccagaat G/C ctctgtctgcacttggctct | 7432 | | |
| CEL | 52 | intron 1 + 87670 | tattttgttcctaatattca T/C gacatgacacaccaacataa | 7433 | | |
| CEL | 53 | intron 1 − (77484-77503) | ttggttactgttttttattt (A)9-10 aaactctgataaaaggggcc | 7434 | | |
| CEL | 54 | intron 1 + 77368 | agctcacgggacagaacact G/C gggggaggcaagaaagcggg | 7435 | | |
| CEL | 55 | intron I − (75135-70129) | tgcccggctggcacaagccct (G)6-7 tgggactactctgacgcctc | 7436 | | |
| CEL | 58 | intron 1 − 74785 | gctgcccacggaagctgggg G/C ctgttcgcctcttctcctgt | 7437 | | |
| CEL | 57 | intron 1 − 74755 | tcttctcctgtgtacatgaa A/G cctcaggcctccaggtgcag | 7438 | | |
| CEL | 58 | intron 1 − 73099 | ccccgcggtctactcctggc C/T tcttcttgccgccgcctgct | 7439 | | |
| CEL | 59 | intron 1 − 72559 | agcagcagctgggccggtcc G/A tgcagggagtgaggtcggca | 7440 | | |
| CEL | 60 | intron 1 − 70098 | acagggaggaaacagcaaaa T/C ctcaacactgttgatctaat | 7441 | | |
| CEL | 61 | intron 1 − 69440 | gttggccatgagagaaaaca C/T aggaaggtattggaaaatga | 7442 | | |
| CEL | 62 | intron 1 − 65270 | attctgcactggctgggaag G/Δ cttggcttgggcttcatggc | 7443 | | |
| CEL | 63 | intron 1 − 64434 | ccaaattagggagtggaatg C/T aaaatctgaattaattttca | 7444 | | |
| CEL | 64 | intron 1 − 63966 | agatcacacatcccccaccc C/T atcgcctagagaactgagcc | 7445 | | |
| CEL | 65 | intron 1 − 63916 | gctgctcaccatgacctagc C/T ttcagggctgaccccagtcc | 7446 | | |
| CEL | 66 | intron 1 − 60392 | tcatggggctccaggatgca C/T gtggaaatccctgggagaag | 7447 | | |
| CEL | 67 | intron 1 − 60321 | aattacttgaaccccattcc A/T tcccacccaaacccttttcc | 7448 | | |
| CEL | 68 | intron 1 − 60318 | tacttgaacaaaattcaatc C/T cacacaaacaattttcctcc | 7449 | | |
| CEL | 69 | intron 1 − 56852 | tgctccaagccctccccctg C/A gcccagcacgaccccatctc | 7450 | | |
| CEL | 70 | intron 1 − 56133 | gctggctcgtgggatgtcta C/T ggggattgactggcaccccc | 7451 | | |
| CEL | 71 | intron 1 − 55964 | ccccagcgcccatcagaccg a/A cctgagacttatcactgccc | 7452 | | |
| CEL | 72 | intron 1 − 52016 | tactggaactaggggtgggg G/A ggcactgccagtggaaaggg | 7453 | | |
| CEL | 73 | intron 1 − 51998 | gggggcactgccagtgccca G/A gggaggggactgcggggcac | 7454 | | |
| CEL | 74 | intron 1 − 51578 | gtgggatcgacttgcatttt T/C gggggagaagaataactggt | 7455 | | |
| CEL | 75 | intron 1 − 39557 | ggaccagcacatggattcaa T/C gaggctctaagctacccaag | 7456 | | |
| CEL | 76 | intron 1 − 39490 | gccctttcttccaggttgta A/G tgggcaatgatggtcaccag | 7457 | | |
| CEL | 77 | intron 1 − (31332-31340) | tccggacttctaattggctc (A)8-9 ctcgctcggccctcggattc | 7458 | | |
| CEL | 78 | intron 1 − 19634 | ttatttaagggctggaaata C/T tagctgcctgcaggagatgt | 7459 | | |
| CEL | 79 | intron 1 − 6589 | gacgggtgatgcgagggact T/C gctgtccccaagtgtatggg | 7460 | | |
| CEL | 80 | intron 1 − (3340-3348) | gctggcagtgctggcctgtc (C)4-6 tcacatgtggtcgggttggg | 7461 | | |
| CEL | 81 | intron 3 + 35 | tgcaggaatggccatgagga G/A gggcgggtgagggcggctga | 7462 | | |
| CEL | 82 | intron 6 + 157 | gtggggagcggccttggtga C/T gggatttctgggtcaagtag | 7463 | | |
| CEL | 83 | exon 9 + 137 | aacatggacggacacatctt C/T gcaagcatcgacatgcctcc | 7464 | | |
| CEL | 84 | intron 9 + 41 | tcaggggcgacacgtgcggg A/G gggcagccgggaaagcactg | 7465 | | |
| CEL | 85 | intron 9 + 181 | ggggtgagtatgcacacaca T/C tcctgttggaaaaggatgag | 7466 | | |
| CEL | 86 | exon 10 + 82 | acgacctttgatgtctacac C/T gagtcatgggaccaggaccc | 7467 | | |
| CEL | 87 | exon 12 + 583 | cccacgggtgaatacggggc C/A cacccagtgaacaacaaggg | 7468 | | |
| CEL | 88 | exon 12 + 759 | gttttagagtaacatgagca T/C tggtatcaagaggccacaag | 7469 | | |
| TL17 | 1 | 5′flanking + 832 | cctgagaaggaactattctc A/G aggaaatgagtaaaacttaa | 7470 | | |
| TL17 | 2 | 5′flanking + 692 | tgccccccttttatcaatct C/T cataacctttctccagtctc | 7471 | | |
| TL17 | 3 | 5′flanking + 76 | ccctgaacccactgcgacac G/A ccacgtaagtgaccacagaa | 7472 | | |
| TL17 | 4 | intron 1 + 18 | gtggtgagtcctgcactaac G/A tgcgatcctcttgatgattt | 7473 | | |
| TL17 | 5 | intron 1 + 126 | ctgtatatgtaggataggaa A/G tgaaagctttggtaggtatt | 7474 | | |
| TL17 | 6 | intron 1 + 762 | ctgagaacaatggtgcagga G/A gatatttataaatagaaaat | 7475 | | |
| TL17 | 7 | intron 2 + 594 | tattttgatcatttgacttc A/T tacaaataagtctctgttct | 7476 | | |
| TL17 | 8 | exon 3 + 1487 | agctgatggggaagaacgaa C/T tttaagtatgagaaaactta | 7477 | | |
| TL17 | 9 | 3′flanking + 657 | ccctgaatctttttaattat G/T catctaactaattcctaaca | 7478 | | |
| UCHL3 | 1 | 5′flanking − 1034 | ataatgtgaagaagaaaaaa A/G agaaactgctactgggctac | 7479 | | |
| UCHL3 | 2 | 5′flanking − 490 | aactactgcacaccgacaaa G/C gaacaacagcaacgtgctga | 7480 | | |
| UCHL3 | 3 | 5′flanking − 400 | aaaagaaaaacgaaaaacag T/C accgtgatgaacggcgtcct | 7481 | | |
| UCHL3 | 4 | 5′flanking − 295 | atgcgtagaacgcgagcgct T/C ggaaaggctaagctcggaag | 7482 | | |
| UCHL3 | 5 | 5′flanking − (25-11) | tgggcggaagcggcggcggc GGCGAAGGCGGCGGC/Δ tgtcagagctg | 7483 | | |
| UCHL3 | 6 | intron 2 + 28 | aggtgtctgtcgctcgggac T/C tcggagtcttttctgtctgc | 7484 | | |
| UCHL3 | 7 | intron 2 + (5639-9640) | aattttttattataataata (ATA) tataagtagaagaattatat | 7485 | | |
| UCHL3 | 7 | intron 2 + (5639-5840) | aattttttattataataata tataagtagaagaattatat | 7486 | | |
| UCHL3 | 8 | intron 2 + 7062 | aggtggattcaaaccaaaca G/A gctaactgctaacattttag | 7487 | | |
| UCHL3 | 9 | intron 2 + (7936-7947) | tgatcatttcaaacacaggg (T)11-12 aattgtaaaagtaggacatt | 7488 | | |
| UCHL3 | 10 | intron 2 + (7975-7988) | aaagtaggacattttaatga (T)12-14 gaagaagtgagtggtaaaag | 7489 | | |
| UCHL3 | 11 | intron 2 + 8117 | cctgactcatggcaatatgg A/G gtaaggatctaacaatatat | 7490 | | |
| UCHL3 | 12 | intron 2 + 8361 | ttcttacctttacctgacat G/A gagtagatttgcagtgaact | 7491 | | |
| UCHL3 | 13 | intron 2 + 9800 | taagatatagtgatgcattt C/T taatatgatttttgtttcct | 7492 | | |
| UCHL3 | 14 | intron 2 + (10735-10747) | taccaactaatgttccattg (T)9-10 ctttctttcttttaccagtt | 7493 | | |
| UCHL3 | 15 | intron 3 + 11 | tacagaaaaggtaattgtta A/T gtaaaatagaaagtttctgg | 7494 | | |
| UCHL3 | 16 | intron 3 + (662-675) | cttaaatacaattttttcaa (TA)6-7 aggaatattctttgattatt | 7495 | | |
| UCHL3 | 17 | intron 3+ 866 | tcaagtctacatattttagt T/C tttttttctagaatgatata | 7496 | | |
| | | | tacatacgtatacgtatata | | | |
| UCHL3 | 18 | intron 3 + (94 + 945) | (TGTATACGTATACATACGTATACATATATACATACGTATATA) | 7497 | | |
| | | | cgtacgtatatacgtatacg | | | |
| UCHL3 | 18 | intron 3 + (94 + 945) | tacatacgtatacgtatata | 7498 | | |
| | | | cgtacgtatatacgtatacg | | | |
| UCHL3 | 19 | intron 3 + 5052 | aggcagtcagctatagagcc T/C acatttttgatgcttattat | 7499 | | |
| UCHL3 | 20 | intron 3 + 5282 | acctctgttaagtttttgca T/C accctttcagactttccaat | 7500 | | |
| UCHL3 | 21 | intron 6 + 2191 | tttctaggggtttcctagtg C/T gtagagcagtgattctcaag | 7501 | | |
| UCHL3 | 22 | intron 6 + 8284 | tctgcaagtcaaatgtgaag C/G caagagagaaaaatccaaaa | 7502 | | |
| UCHL3 | 23 | intron 6 + (8741-8744) | atgtgagtaaaccacaattt ATTT/Δ ttcatttccttaacttttga | 7503 | | |
| UCHL3 | 24 | intron 6 + 9411 | tcctctgtttagaatctact T/G ggcttttttggcccagccag | 7504 | | |
| UCHL3 | 25 | intron 6 + 9459 | tgtcagtggcagtaaatagt T/A taaagtttcatcttcattac | 7505 | | |
| UCHL3 | 26 | intron 6 + 9772 | gaaacaatacatgtatcatg T/C ggttcaagatgtagagtcca | 7506 | | |
| UCHL3 | 27 | intron 6 + 10158 | ttattttaaaggaaaattct C/T agaccgaacttaccagttca | 7507 | | |
| UCHL3 | 28 | intron 6 + 10829 | tttactaaaaaatctacaga A/C atccatttagaattaattta | 7508 | | |
| UCHL3 | 29 | intron 6 + 12493 | agtcaaattagttgacagtt A/G atgggcgagtgaccttgcaa | 7509 | | |
| UCHL3 | 30 | intron 6 + (20435-20437) | ttttttaattatgtagtcct CCT/Δ cgccatcctcatcacagcct | 7510 | | |
| UCHL3 | 31 | intron 6 + 21202 | ttgatctgatctttcctgcc C/T attcagtttctaaagatctt | 7511 | | |
| UCHL3 | 32 | intron 6 + 21295 | caaatttatgatttctcttt T/C ataggctaatgatatctgca | 7512 | | |
| UCHL3 | 33 | intron 6 + 21639 | taagaacaattaaaagtcaa C/T ggcaagcattctttccttcc | 7513 | | |
| UCHL3 | 34 | intron 6 + 21778 | tccatttctgctgagtatca A/G caaactcacatctctttcta | 7514 | | |
| UCHL3 | 35 | intron 6 + 23299 | cttttagattaaaggtgcaa T/C gatgcacaattttgagtcac | 7515 | | |
| UCHL3 | 36 | intron 6 + 23498 | tattcagttctctgactcca A/G ttgtactacttttacctcta | 7516 | | |
| UCHL3 | 37 | intron 6 + 23790 | ctagccttaaaaaattggac A/T ctcttctgattattgataaa | 7517 | | |
| UCHL3 | 38 | intron 6 + 23894 | actcattatcactgtcttca A/G atatttaaagaaatatgttc | 7518 | | |
| UCHL3 | 39 | intron 6 + (24729-24732) | agtcttaatttcaaattgtt TGTT/Δ aagcatcaaagcaagagaaa | 7519 | | |
| UCHL3 | 40 | intron 6 + (29083-25084) | catgtattcatttcattcag (A) taagtatgcaatgtccatat | 7520 | | |
| UCHL3 | 40 | intron 6 + (25083-25064) | catgtattcatttcattcag taagtatgcaatgtgcatat | 7521 | | |
| UCHL3 | 41 | intron 6 + 25884 | catgtattcatttcattcag C/T aagtatgcaatgtgcatata | 7522 | | |
| UCHL3 | 42 | intron 7 + 1342 | gaagaagtcattattttggt C/A gcatataatggacctccagg | 7523 | | |
| UCHL3 | 43 | intron 7 + 1387 | ttttgaagatgtgccttgct G/A attgagtctacaaaatctgc | 7524 | | |
| UCHL3 | 44 | intron 7 + 1760 | actcggttttactagttaga T/C agctgtcttggctcagaggc | 7525 | | |
| UCHL3 | 45 | intron 7 + 2096 | taggtacattacaaagatgg C/A cagttgctgattcgttgcaa | 7526 | | |
| UCHL3 | 46 | intron 7 + 2873 | ttaatgtattaattccctac T/C ctaataaattgtaaggttaa | 7527 | | |
| UCHL3 | 47 | intron 7 + 7594 | tctctgagcctcatggattc T/A tctgcagcgtatgcatttac | 7528 | | |
| UCHL3 | 48 | intron 8 + 287 | ctctatgaacaaatgtaaaa T/A ttgaaaaggcaagaatagta | 7529 | | |
| UCHL3 | 49 | intron 8 + 252 | aagacttgctcattatatcc C/G agatttcatnaaatccagga | 7530 | | |
| UCHL3 | 50 | intron 9 + (553-592) | tttacactgaaaaatcatac (T)9-10 ccggcatagcatgccataca | 7531 | | |
| DDOST | 1 | intron 2 629 | attctgttaagaagttctta T/C atgaacaaatattgtctcct | 7532 | | |
| DDOST | 2 | intron 2 3125 | gagaatataggagcttctgc C/A tatgcctgaaagtcagtcag | 7533 | | |
| DDOST | 3 | intron 2 3920 | attactcatttgatgaataa A/G tggattactgagcactgtct | 7534 | | |
| DDOST | 4 | intron 3 189 | actgctgtccaggggtccat C/T tggggctgagcccacctgga | 7535 | | |
| DDOST | 5 | intron 6 185 | ctgtcctcttgttcgggagg C/T gtggcagcttttcccctact | 7536 | | |
| DDOST | 6 | exon8 37 | aactatgaactagctctggc C/T ctctcccgctgggtgttcaa | 7537 | | |
| DDOST | 7 | intron9 37 | tcctgcccaagaatgctgcc A/Δ aaaaacggccccacgcctca | 7538 | | |
| DDOST | 8 | intron2 + 1299 | atcttctgatggctgggctt C/T ggtgcagtaactggtgtttg | 7539 | | |
| DDOST | 9 | intron2 + 1581 | gatactgtgggtgggagaaa T/C gacagagagtgtaaaacagt | 7540 | | |
| DDOST | 10 | intron2 + 2822 | gtttctcaacaggtgcattc T/C tgacgtttcagactggatac | 7541 | | |
| DDOST | 11 | intron2 + 3392 | cagaaggcgtggaggcctgc C/T gcgcctccctctgttgctgc | 7542 | | |
| DDOST | 12 | intron5 + 495 | attgcttgaacccaggacgc C/A gaggttgcagtgagccaagg | 7543 | | |
| DDOST | 13 | intron6 + 226 | ggaactgcttgggtcacagc C/T ccgccttgcccccagtaccc | 7544 | | |
| DDOST | 14 | intron6 + 303 | aagagagataggtcattagg A/T tgaatttgttaggcaagaga | 7545 | | |
| DDOST | 15 | 3′flanking + 40 | cacagcgtggagacggggca C/A ggaggggggttattaggatt | 7546 | | |
| NTE | 1 | 5′flanking − 535 | cacgatctgtcctccgattc C/T tgttaactctagactttctg | 7547 | | |
| NTE | 2 | 5′flanking − 15 | gtaaatccccggcaaaaacc A/G gcagcgccttgcaagcccac | 7548 | | |
| NTE | 3 | 5′flanking − 748 | agcatggcgcggggaggagg C/T gtgggagggtcgggagggac | 7549 | | |
| NTE | 4 | 5′flanking − 690 | tgaataatttaaaggggccg T/C gccggcggagccgggcggaa | 7550 | | |
| NTE | 5 | intron6 + 605 | ccttgccatatacttagtgg A/G ggggtctacatcaggggttt | 7551 | | |
| NTE | 6 | intron6 + 749 | agcctccagcctctcttctc C/T gggggttatctcaggcatct | 7552 | | |
| NTE | 7 | intron6 + 957 | ggtctgggctctgggatccc C/T gtgcgtcatgtagtctacct | 7553 | | |
| NTE | 8 | intron6 + 1882 | tggcctcaagcaatcctccc C/A cctcggcctcccaaagcgcc | 7554 | | |
| NTE | 9 | intron6 + 2222 | gaatgtttatgtagaacaga C/A agactgtatctgcggtcttc | 7555 | | |
| NTE | 10 | intron12 + 166 | tatctggtaccgaggaagct C/G cggcctcgtccccaagggcc | 7556 | | |
| NTE | 11 | intron13 + 69 | atccaggtccaccgcctgcc C/T gtcttgattgttttaatctg | 7557 | | |
| NTE | 12 | intron14 + 8 | agcccccgctcgggtaaggc C/T tgggaccctgcccgctggtg | 7558 | | |
| NTE | 13 | intron16 − 113 | cccaccccgcccggcgccgt T/C atatttttcttaacccttcc | 7559 | | |
| NTE | 14 | intron21 + 34 | agagcccgccggcccagagc A/G tgctgggagatgtagtccgg | 7560 | | |
| NTE | 15 | intron21 + 128 | gaagaaatcgtgccgctgag C/A gtttcaaaccctaagtagga | 7561 | | |
| NTE | 16 | intron21 + 151 | ctcaaaccctaagtaggacc C/G aggtgcagagcattctgggc | 7562 | | |
| NTE | 17 | intron21 + 601 | ccactgtactcaagccggga C/T gacagagctagaacctcttt | 7563 | | |
| NTE | 18 | intron21 + 737 | tggaaaatagtctgtggatt G/T ttgtttaggactctgggcac | 7564 | | |
| NTE | 19 | intron21 + 1752 | acagctggtctaggctgtta G/C tggagaaactgggaagcaac | 7565 | | |
| NTE | 25 | intron31 + 1785 | gaagcaacagctgggtcaaa A/Δ gtagcttttcttttcttggc | 7566 | | |
| NTE | 21 | intron21 + 1907 | cactgcaacctctgcctccc A/G ggttcaagtgattctcctgc | 7567 | | |
| NTE | 22 | intron21 + 2065 | ctgcctcgttttatgttcag G/T tcccccattagacagaggaa | 7568 | | |
| NTE | 23 | intron21 + 2336 | agtctgggagcacaggagca G/A gaatttcagataaggaggaa | 7569 | | |
| NTE | 24 | intron23 + 41 | tggggagggtggtgggtggg G/C ctggagcctcaaattctttc | 7570 | | |
| NTE | 25 | intron23 + 71 | caaattctttcagacctgag T/C tcaagttctcggcttccaac | 7571 | | |
| NTE | 26 | intron23 + 81 | cagacctgagttcaagttct C/T ggcttccaaccacggagcct | 7572 | | |
| NTE | 27 | intron24 + 150 | gtggggcggctggtgacctc A/G gccgtccgtattccgcagct | 7573 | | |
| NTE | 28 | intron29 + 37 | gcctgcagcaaccgctgacg T/C cacgtggggttggggggatg | 7574 | | |
| NTE | 29 | intron29 + 370 | cgtcccaggtcagcgagccc G/A tcgggccggctgggcctccg | 7575 | | |
| NTE | 30 | intron30 + 56 | acctcccgcaccacacacac G/A cacacgcgtgggcacacaca | 7576 | | |
| NTE | 31 | intron30 + 358 | aaaaatacaaaaaattaacc A/G ggctggtggggtgtgcctgt | 7577 | | |
| NTE | 32 | intron30 + 372 | ttaaccaggctggtggggtg T/C ctggagcctcaaattctttc | 7578 | | |
| NTE | 33 | intron30 + 430 | aaatcacttgaacctgagag G/T tggaggttgcagtgagctga | 7579 | | |
| NTE | 34 | intron30 + 655 | gtgtgcacaccagctatata T/C gcaaatgctttctctcaggg | 7580 | | |
| NTE | 35 | intron30 + 655 | gcacaccagctatatataca A/G atgctttctctcaggggcag | 7581 | | |
| NTE | 36 | intron30 + 760 | tgaaatagggcatttgccaa C/T gcatgccagtctgtcccgtt | 7582 | | |
| NTE | 37 | intron30 + 835 | gcacacacgtagataggatg T/C ggcacctctgaccgagttaa | 7583 | | |
| NTE | 38 | intron31 + 40 | tggtgcctgcataggtggtc T/C ggctaagctttgctacttaa | 7584 | | |
| NTE | 30 | intron31 + 41 | ggtgcctgcataggtggtct G/A gctaagctttgctacttaaa | 7585 | | |
| NTE | 40 | intron31 + 1329 | gtctgtcaagggcaggacag G/A aaatatgtaaacgaatgtac | 7586 | | |
| NTE | 41 | intron35 + 31 | aatggcttcctgtcgttttc G/A gactggggacccaccttctg | 7587 | | |
| L1CAM | 1 | intron 1 + 767 | tttgacttccttacatgggt G/A actgtgtgagtcactctgtt | 7588 | | |
| L1CAM | 2 | intron 1 + 862 | gcattgagtcatgtgtatgt G/C tgagtggggctgaatgtaag | 7589 | | |
| L1CAM | 3 | intron 1 + 1332 | cagggatgaaggagcagagc C/T actgaaaggccacacagatg | 7590 | | |
| L1CAM | 4 | intron 4 + 552 | tttccctggggttttccctt T/C gcattccatcctccctgagc | 7591 | | |
| L1CAM | 5 | intron 18 + 147 | agcgacgttatgaaattccc C/A acacttcacatttctataat | 7592 | | |
| L1CAM | 6 | intron 24 + 221 | ctccttagccccccagaggg C/T cccaactttaagagcatact | 7593 | | |
| AANAT | 1 | 5′flanking − 542 | aggggtgcaggatgaggtgt G/T agctggagggcagggggtag | 7594 | | |
| AANAT | 2 | 5′flanking − 263 | ccccccacataagaggtggg C/G ttgtccaagactccgaggga | 7595 | | |
| AANAT | 3 | intron3 39 | cgcccagctccagggaggcc T/A ctgaaaacagaggtcagcca | 7596 | | |
| AANAT | 4 | exon4 150 | cagccagccatacgccaggc C/T gcgctcatgtgcgaggacgc | 7597 | | |
| ARD1 | 1 | intron1 + 317 | ccgtcggtctgctcggcccc C/G etccctcggggctaggcagg | 7598 | | |
| ARD1 | 2 | intron6 + 322 | gctcctcagcatctgctcac G/A ccagggacccacacctctct | 7599 | | |
| ARD1 | 3 | intron6 + 1095 | aaggctccatcctgagacaa A/G aaatccaatataacctgccc | 7600 | | |
| ARD1 | 4 | intron6 + 1179 | aggaggaagacctgtatccc A/G gggacaccctcctccactcc | 7601 | | |
| ARD1 | 5 | intron7 + 159 | cctccaggctgctaggcaga C/T ggcctcctctaaagcccagc | 7602 | | |
| ARD1 | 6 | intron7 + 295 | tgaccagccctgccacccga G/T gagccttggacagaaccctg | 7603 | | |
| ARD1 | 7 | intron7 + 416 | actaccatggaggcccacac G/A acagagcgctgccccttgac | 7604 | | |
| NAT1 | 1 | 3′UTR 215 | aataataataataataataa A/T aaatgtattttaaagatggc | 7605 | | |
| NAT2 | 1 | exon2 867 | cgtgcccaaacctggtaata G/A atcccttactatttagaata | 7606 | | |
| NAT2 | 2 | 3′flank 521 | ccatccatactttgccacaa G/A agaaagaacatgagctttat | 7607 | | |
| NAT2 | 3 | 3′flank 573 | gatttcaaatcctgtagaca C/T ggggtgaattacttttaaaa | 7608 | | |
| NAT2 | 4 | 3′flank 918 | attttctatttgtaaattcc A/G gtatcaaggctatagtttaa | 7609 | | |
| NAT2 | 5 | 3′flank 979 | actattctccctcttcgact C/T gtgatgactataataatctt | 7610 | | |
| NAT2 | 6 | 3′flank 1955 | tacctattgaagtaaaccta C/T gtcatatccacctatttgtt | 7611 | | |
| NAT2 | 7 | 3′flank 2034 | ccactgattcccaaagctag T/G tcattaagaaaacaatgcct | 7612 | | |
| NAT2 | 0 | 3′flank 2201 | cagattactggagggctact G/A tttgctcaccaatacaaatg | 7613 | | |
| NAT2 | 9 | 3′flank 2818 | gggatatttgtctcctttct C/G cccaatgcatattggaaacc | 7614 | | |
| NAT2 | 10 | 3′flank 3237 | atatatattccaattaaaaa A/Δ caaaataaatttccaaaact | 7615 | | |
| NAT2 | 11 | 3′flank 3386 | caacaaagagattttttaaa G/A ctttttaaaacaccagacag | 7616 | | |
| NAT2 | 12 | 3′flank 3660 | cagcactattcacaatagca A/G agatgtgaaatcaatctaaa | 7617 | | |
| NAT2 | 13 | 3′flank 3973 | agcagaaaaaataaataata C/T gtactagacttactacctac | 7618 | | |
| NAT2 | 14 | 3′flank 4029 | caaaacaaacccccataaca T/C gagtttatctatataacaaa | 7619 | | |
| NAT2 | 15 | 3′flank 4118 | ataagattaatatctgcata C/A aaatctttgtttacaactta | 7620 | | |
| NAT2 | 16 | 3′flank 4146 | tgtttacagcttgttatata C/T tgaattatgtctgctccccc | 7621 | | |
| NAT2 | 17 | 3′flank 4279 | ttaatctgataaaattggtg G/C ctttataagaaaaagaaaag | 7622 | | |
| NAT2 | 18 | 3′flank 4323 | ttgctctctccccagtgcag T/G taccaaggaaagaccatgta | 7623 | | |
| NAT2 | 19 | 3′flank 4446 | tcaattaactttatctgcaa T/C tctagaatcaggcaatactc | 7624 | | |
| NAT2 | 20 | 3′flank 4462 | gcgattctggaatcaggcaa T/C actccatttcataaaacaga | 7625 | | |
| NAT2 | 21 | exon2 + 255 | atgttaggagggtattttta C/T atccctccaattaacaaata | 7626 | | |
| NAT2 | 22 | 5′flank − 2053 | ctaaattaaaacattttaat T/C ccaggtgtcaggtttccaac | 7627 | | |
| NAT2 | 23 | 5′flank − 1299 | gaatcaccaatgcaagagat A/G taacaatgaacccaagacac | 7628 | | |
| NAT2 | 24 | 5′flank − 1145 | ctgtagaacacaaggatatt C/T aaagacagtttgtacatacc | 7629 | | |
| NAT2 | 25 | 5′flank − 1036 | ccttcccacagagtcccgag T/A tcatgtgacagcatgccaga | 7630 | | |
| NAT2 | 26 | 5′flank − 94 | aaaaatttgctaagaaattc G/A cagaagcaacctaaggccct | 7631 | | |
| NAT2 | 27 | 5′flank − 643 | atgtttatattttatattaa T/C attaatgtaaataaaaattt | 7632 | | |
| ABCB2 | 1 | 5′flanking − 673 | agctaagagtcaaagcaccc G/C ctttttccaccagcctcgcg | 7633 | | |
| ABCB2 | 2 | 5′flanking − 646 | ccaccagcctcgcgtgcctg T/C tcccttcacggacactctag | 7634 | | |
| ABCB2 | 3 | 5′flanking − 563 | ttgcaagcgctggctgctac A/G ggcgacctccctgcgctccc | 7635 | | |
| ABCB2 | 4 | 5′flanking − 236 | gctttgcgcgcggcgctaac C/T tgtgtagggcagatctgccc | 7636 | | |
| ABCB2 | 5 | Intron3 + 408 | aaggaaactgaggccaagac C/T ctaaatgctgaaactgcaca | 7637 | | |
| ABCB2 | 6 | Exon4 + 153 | ccctcaccatggtcaccctg A/G tcaccctgcctctgcttttc | 7638 | | |
| ABCB2 | 7 | Intron4 + 289 | gtatttctttagcatccaag G/T ggcatagctgtgtctctttc | 7639 | | |
| ABCB2 | 8 | Intron4 + 291 | atttctttagcatccagggg C/G catagctgtgtctctttctc | 7640 | | |
| ABCB2 | 9 | Intrpn5 − 63 | ttccttcaggttaatgactg C/T ggttctttgtgtcccctcca | 7641 | | |
| ABCB2 | 10 | Intron7 − 185 | gtctctgcccttgtctttgc C/T gcttcttctatctctactcc | 7642 | | |
| ABCB2 | 11 | 3′flanking + 71 | agcgcacttttcagctgcgg C/A tgtctcctcttttatcatcc | 7643 | | |
| ABCB2 | 12 | 3′flanking + 129 | aactgcatcaccttttccct T/C aagctttttaattcctatga | 7644 | | |
| ABCB2 | 13 | 3′flanking + 455 | cattcagggaggcccaggtc C/A tgtgacgtcgacagttgctg | 7645 | | |
| ABCB3 | 1 | intron3 + 8 | tctcctttggcaggtaggtg C/A tgggcagctgggtccatttg | 7646 | | |
| ABCB3 | 2 | intron4 + 104 | cttcacccgtatgccaggac C/T tggggatgcttttctcttgt | 7647 | | |
| ABCB3 | 3 | intron10 + 219 | gcagcactggtgctccctcc A/G tgggcagccccgtcaggtcc | 7648 | | |
| ABCB3 | 4 | intron11 + (317-319) | atggtgcccaggtggatgtg GTG/Δ tccatctcattcctgtcttt | 7649 | | |
| ABCB3 | 5 | exon12 + 19 | agctgcaggactggaattcc T/C gtggggatcgcacagtgctg | 7650 | | |
| ABCB3 | 6 | exon12 + (356-357) | aggtggggtggcgtggggtc GG/TGGTGGGGTGGA ggctgtctgtgtcc | 7651 | | |
| GSTM3 | 1 | 5′flanking − 144 | ccaacgccggcattagtcgc C/G cctgcgcacggccctgtgga | 7652 | | |
| GSTM3 | 2 | intron 7 + 165 | agcctaacttctataccttg A/G aggcactgtctacaaaaaaa | 7653 | | |
| GSTM3 | 3 | intron 7 + 257 | ctgttgcactgggtggggtc C/G ttataagattggtgtatttt | 7654 | | |
| GSTM3 | 4 | exon 5 + 51 | cccagtggggcaacaagcct A/G tatgctgagcaggaggcaga | 7655 | | |
| GSTM4 | 1 | intron 4 + 67 | ttggctggattggggtgcta C/G gctcacagtgagtctgtgtt | 7656 | | |
| GSTM4 | 2 | intron 7 + 77 | gatgctttcccagtcctgga T/C ctgcataaagaataacttgc | 7657 | | |
| GSTM4 | 3 | intron 7 + 80 | gctttcccagtcctggatct C/A cataaagaataacttgcatt | 7658 | | |
| ALDH7 | 1 | intron1 + 464 | catgaatgactctgggaaag A/G atcattcttagcaatggact | 7659 | | |
| ALDH7 | 2 | intron1 + 2269 | aaatggaatccaaacagcaa C/G agacatcccctcaccggtca | 7660 | | |
| ALDH7 | 3 | intron2 + 1349 | actgagcttctgccaccggc C/G gcctgccggccttcatgaga | 7661 | | |
| ALDH7 | 4 | intron2 + 1820 | tccgtgtgggaggcaccttc C/G cccagcctcagtggctagga | 7662 | | |
| ALDH7 | 5 | intron2 + 2046 | aacctcaggcgctgcctcag C/G cagggagccagcctggcccc | 7663 | | |
| ALDH7 | 6 | intron2 + 2939 | aagcacgcactgaacatgga C/A tgagtgagtgaaccaatgaa | 7664 | | |
| ALDH7 | 7 | intron3 + 7 | tgcccaggaacctggtgagc C/T ggccgggctgaggcgggcag | 7665 | | |
| ALDH7 | 8 | intron4 + 36 | gccccttccggtcacccttc T/C ccgctcgaggcctcagggcc | 7666 | | |
| ALDH7 | 9 | intron6 + (116-117) | attctcctctctctctctct CT/Δ ggacaaggctgggagcagtc | 7667 | | |
| ALDH7 | 10 | intron6 + 263 | cagaccctcatacgtgaccc C/G gctgccccccaggctcttag | 7668 | | |
| HMG17L1 | 1 | 3′untranslated + 864 | ctttctgatttttgatagtc C/G gttgaagaagggagtttgaa | 7669 | | |

[0561] In some embodiments, a drug-metabolizing enzyme is at least one of the following: epoxide hydrolase, methyltransferase, N-acetyltransferase, sulfotransferase, quinone oxidereductase, glutathione S-transferase, UDP-glycosyltransferase, aldehyde dehydrogenase, alcohol dehydrogenase, esterase, NDUF, cytochrome P450 (CYP) and ATP-binding cassette.

[0562] The present invention relates to a method for detecting a genetic polymorphism in a test subject using the genetic polymorphism data related to a drug metabolizing enzyme. The present invention analyzes the effectiveness, safety and strength of drugs metabolized by a drug metabolizing enzyme. The relationship between a disease and the drug to be evaluated is based on the results of the analysis. The genetic polymorphism data for the drug metabolizing enzyme is different for each patient with a given disease. Therefore, the effectiveness and safety of a specific drug depends on drug metabolism in the presence of certain genetic polymorphism data and the side effects in the presence of certain genetic polymorphism data. As a result, a physician can determine whether a certain drug should be used by a certain patient and can tailor drugs for use by a certain patient based on the genetic polymorphism data (so-called “made-to-order” treatments).

[0563] “Drug metabolizing enzymes” refer to a group of enzymes that catalyze in vivo structural changes in exogenous materials including drugs. When used for clinical purposes, the group of metabolizing enzymes includes some endogenous materials. Because drug-metabolizing enzymes absorb, metabolize and secrete drugs, the polymorphism of an enzyme depends on the amount of enzyme expressed (transcription and translation) and the amount of activity. As a result, there are blood serum concentrations of both unchanged materials and metabolites.

[0564] Drug metabolizing enzymes expressed by the genes that are targeted for genetic polymorphism analysis in the present invention include, but are not limited to the following classes of enzymes:

[0565] Epoxide hydrolases

[0566] Methyltransferases

[0567] N-acetyltransferases

[0568] Sulfotransferases

[0569] Quinone oxidereductases

[0570] Glutathione S-transferases

[0571] UDP-glycosyltransferases

[0572] Aldehyde dehydrogenases

[0573] Alcohol dehydrogenases

[0574] Esterases

[0575] Ubiquinone dehydrogenases: NDUF

[0576] Cytochrome P450s (CYPs)

[0577] ATP-binding cassettes

[0578] ATP-binding cassettes/Transporters

[0579] Examples and descriptions of these enzymes are provided below.

[0580] (1) Epoxide hydrolases are enzymes that hydrolyze epoxide using a trans-cleavage mechanism to produce 1,2-glycol. Examples include microsomal epoxide hydrolase 1 and cytoplasmic epoxide hydrolase 2.

[0581] (2) Methyltransferases are enzymes that catalyze transmethylation in amino groups, hydroxyl groups and thiol groups. Examples include the following.

[0582] Catechol-O-methyltransferase

[0583] Vitamin-N-methyltransferase

[0584] Phenylethanolamine-N-methyltransferase

[0585] Phosphatidylethanolamine-N-methyltransferase

[0586] Nicotinamide-N-methyltransferase

[0587] Acetylserotonin-O-methyltransferase

[0588] Thiopurine S-methyltransferase

[0589] (3) N-acetyltransferases are enzymes that catalyze transacetylation in amino groups, sulfonamide groups and hydrazine groups. Examples include the following.

[0590] Arylamine-N-acetyltransferase 1, 2

[0591] Arylalkylamine-N-acetyltransferase

[0592] N-acetyltransferase homologues of saccharomyces cerevisiae

[0593] LI intracellular adhesion molecules

[0594] (4) Sulfotransferases are enzymes that contribute to sulfate conjugation and catalyzes trans-sulfonylation in phenols, steroids, arylamines and biliary acid. Examples include the following.

[0595] Sulfotransferase 1A1, 1A2, 1A3, 1C1, 1C2, 2A1, 2B1

[0596] Thyroid hormone sulfotransferase

[0597] Tyrosyl protein sulfotransferase 1, 2

[0598] Sulfotransferase-opening protein 3

[0599] Estrogen sulfotransferase

[0600] Cerebroside sulfotransferase

[0601] HNK-sulfotransferase 1

[0602] Carbohydrate sulfotransferase 2, 4, 5

[0603] Carbohydrate sulfotransferase 1, 3

[0604] (5) Quinone oxidereductases are enzymes that catalyze the reduction of quinones such as o-quinone and p-quinone. Examples include the following.

[0605] NAD(P)H: Quinone oxidereductase 1

[0606] NRH: Quinone oxidereductase 2

[0607] Quinone oxidereductase homologues

[0608] p53-induced gene 3 (PIG3) of a quinone oxide transferase homologue

[0609] (6) Glutathione S-transferases are enzymes that catalyze the conjugation of glutathione. Examples include the following.

[0610] Glutathione S-transferase Mu1, Mu2, Mu3, Mu4, Mu5

[0611] Glutathione S-transferase Z (zeta)

[0612] Glutathione S-transferase P (pi)

[0613] Glutathione S-transferase 1 T1 (zeta)

[0614] Glutathione S-transferase 1 Theta 1, Theta 2

[0615] Microsomal Glutathione S-transferase 1

[0616] Microsomal Glutathione S-transferase 1-1

[0617] Microsomal Glutathione S-transferase 2, 3

[0618] Microsomal Glutathione S-transferase Ha Subunit 1, 2

[0619] Microsomal Glutathione S-transferase A3, A4

[0620] Glutathione S-transferase A1, A4

[0621] Glutathione S-transferase M1, M2, M3, M4

[0622] (7) UDP-glycosyltransferases are enzymes that catalyze the contribution of glucuronic acid to functional groups such as hydroxyl groups, carboxyl groups, amino groups and thiol groups after their introduction in the 1 st drug metabolism route. Examples include the following.

[0623] UDP-glycosyltransferase 1

[0624] UDP-glycosyltransferase 1 Family Polypeptide A1

[0625] UDP-glycosyltransferase 2 Family Polypeptide A1, B7, B10, B4, B11, B15, B17

[0626] UDP-glycosyltransferase 8

[0627] Dolichyl-diP-oligosaccharide protein glycosyl transferase

[0628] (8) Aldehyde dehydrogenases are enzyme that converts aldehydes into carboxylic acids. Examples include Aldehyde dehydrogenase 1 through 10.

[0629] Aldehyde dehydrogenase 1 family member A1, A2, A3

[0630] Aldehyde dehydrogenase 1 family member B1

[0631] Formyltetrahydroforate dehydrogenase

[0632] Aldehyde dehydrogenase 2

[0633] Aldehyde dehydrogenase 3 family member A1, A2

[0634] Aldehyde dehydrogenase 3 family member B1, B2

[0635] Aldehyde dehydrogenase 5 family member A1

[0636] Aldehyde dehydrogenase 6 family member A1

[0637] Aldehyde dehydrogenase 8 family member A1

[0638] Aldehyde dehydrogenase 9 family member A1

[0639] (9) Alcohol dehydrogenases are enzymes that convert alcohols into aldehydes or ketones. Examples include the following.

[0640] Alcohol dehydrogenase 1 through 7

[0641] Hydroxy-CoA-dehydrogenase

[0642] Short-chain alcohol dehydrogenase family genes

[0643] (10) Esterases are enzymes that hydrolyze some esters. Examples include the following.

[0644] Arylacetoamide deacetylase

[0645] Granzyme A

[0646] Granzyme B

[0647] Interleukin 17

[0648] Ubiquitin carboxyl-terminal esterase L1, 3

[0649] Carboxyl esterase 1

[0650] Lipase A

[0651] Esterase D-formylglutathione hydrolase

[0652] Carboxylester lipase

[0653] Dolichyl-diphosphooligosaccharide-protein glycosyltransferase (DDOST)

[0654] Neuropathy target esterase

[0655] (11) Ubiquinone dehydrogenases (NDUF) are enzymes that support energy metabolism, e.g., as in the mitochondrial respiratory chain. Examples include NADH ubiquinone dehydrogenase 1a Subunit 1 through 10.

[0656] NADH-dehydrogenase (ubiquinone) 1α-subcomplex 1 through 3 and 5 through 10

[0657] NADH-dehydrogenase (ubiquinone) 1α/β-subcomplex 1

[0658] NADH-dehydrogenase (ubiquinone) 1β-subcomplex 3, 5, 7

[0659] NADH-dehydrogenase (ubiquinone) Fe—S protein 1, 3, 4, 5, 6, 8

[0660] NADH-dehydrogenase (ubiquinone) flavoprotein 1 through 3

[0661] (12) Cytochrome P450s (CYPs) are enzymes that regulate 1st drug metabolism and introduce oxygen atoms to the drug. Examples include Cytochrome P450 (CYP) 1A1, CYP 1A2, CYP1B1, CYP 2A6, CYP 2B6, CYP 2C8, CYP 2C18, CYP 2C9, CYP 2C19, CYP 2E1, CYP 2D6, CYP 2E1, CYP 2F1, CYP 3A3, CYP 3A4, CYP 3A5, CYP 3A7, CYP 3A43, CYP 4A1, CYP 4B1, CYP 4F2, CYP 4F3, CYP 4F8, CYP 11B1, CYP 11B2, CYP 17, CYP 19, CYP 21A2, CYP 21A1, CYP 27B1 and CYP 27.

[0662] (13) ATP-binding cassettes absorb the drug and adjust the interstitial concentration with a transporter. Examples include the following.

[0663] ATP-Binding Cassette Subfamily A Members 1 through 6, 8

[0664] ATP-Binding Cassette Subfamily A Members 1, 4, 7, 8

[0665] ATP-Binding Cassette Subfamily B Members 1 through 11

[0666] ATP-Binding Cassette Subfamily B Members 1, 4, 7, 8, 9, 10, 11

[0667] ATP-Binding Cassette Subfamily C Members 1 through 6, 8 through 10

[0668] ATP-Binding Cassette Subfamily C Members 1, 2, 3, 4, 5, 7, 8, 9

[0669] ATP-Binding Cassette Subfamily D Members 1 through 4

[0670] ATP-Binding Cassette Subfamily D Members 1, 3, 4

[0671] ATP-Binding Cassette Subfamily E Members 1

[0672] ATP-Binding Cassette Subfamily F Members 1 through 3

[0673] ATP-Binding Cassette Subfamily F Member 1

[0674] ATP-Binding Cassette Subfamily G Members 1

[0675] ATP-Binding Cassette Subfamily G Members 1, 2, 4, 8

[0676] Organic anion transporters 1, 2, 3

[0677] Organic anion transporter polypeptides 1, 2, 8

[0678] Transporter 1 ATP-binding cassette subfamily B

[0679] Transporter 2 ATP-binding cassette subfamily B

[0680] SLC22A4 solute carrier family 22 (organic cation transporter) member 4

[0681] SLC22A5 solute carrier family 22 (organic cation transporter) member 5

[0682] SLC22A1 solute carrier family 22 (organic cation transporter) member 1

[0683] SLC22A2 solute carrier family 22 (organic cation transporter) member 2

[0684] SLC10A2 solute carrier family 10 (sodium/bile acid cotransporter family) member 2

[0685] SLC15A 1 solute carrier family 15 (oligopeptide transporter) member 1

[0686] (14) Other enzymes include gamma glutamyl transferase 1, transglutaminase 1 and dihydropyrimidine dihydrogenase.

[0687] Genetic polymorphism data relating to DMEs can be obtained using any general genetic polymorphism detection method. Examples include, but are not limited to, PCR or other amplification methods, hybridization methods using an allele-specific oligonucleotide matrix (e.g., TAQMAN PCR method, INVADER assay method), primer extension reaction methods, sequencing methods, MALDI-TOF/MS methods and the DNA chip methods (e.g., microarrays). Examples of detection methods that are applicable to analysis of the DME associated polymorphisms of the present invention include but are not limited to those listed below.

[0688] 1. Direct Sequencing Assays

[0689] In some embodiments of the present invention, variant sequences are detected using a direct sequencing technique. In these assays, DNA samples are first isolated from a subject using any suitable method. In some embodiments, the region of interest is cloned into a suitable vector and amplified by growth in a host cell (e.g., a bacteria). In other embodiments, DNA in the region of interest is amplified using PCR.

[0690] Following amplification, DNA in the region of interest (e.g., the region containing the SNP or mutation of interest) is sequenced using any suitable method, including but not limited to manual sequencing using radioactive marker nucleotides, or automated sequencing. The results of the sequencing are displayed using any suitable method. The sequence is examined and the presence or absence of a given SNP or mutation is determined.

[0691] 2. PCR Assay

[0692] In some embodiments of the present invention, variant sequences are detected using a PCR-based assay. In some embodiments, the PCR assay comprises the use of oligonucleotide primers that hybridize only to the variant or wild type allele (e.g., to the region of polymorphism or mutation). Both sets of primers are used to amplify a sample of DNA. If only the mutant primers result in a PCR product, then the patient has the mutant allele. If only the wild-type primers result in a PCR product, then the patient has the wild type allele.

[0693] 3. Fragment Length Polymorphism Assays

[0694] In some embodiments of the present invention, variant sequences are detected using a fragment length polymorphism assay. In a fragment length polymorphism assay, a unique DNA banding pattern based on cleaving the DNA at a series of positions is generated using an enzyme (e.g., a restriction enzyme or a CLEAVASE I [Third Wave Technologies, Madison, Wis.] enzyme). DNA fragments from a sample containing a SNP or a mutation will have a different banding pattern than wild type.

[0695] a. RFLP Assay

[0696] In some embodiments of the present invention, variant sequences are detected using a restriction fragment length polymorphism assay (RFLP). The region of interest is first isolated using PCR. The PCR products are then cleaved with restriction enzymes known to give a unique length fragment for a given polymorphism. The restriction-enzyme digested PCR products are generally separated by gel electrophoresis and may be visualized by ethidium bromide staining. The length of the fragments is compared to molecular weight markers and fragments generated from wild-type and mutant controls.

[0697] b. CFLP Assay

[0698] In other embodiments, variant sequences are detected using a CLEAVASE fragment length polymorphism assay (CFLP; Third Wave Technologies, Madison, Wis.; See e.g., U.S. Pat. Nos. 5,843,654; 5,843,669; 5,719,208; and 5,888,780; each of which (Northern) is isolated from a subject. The DNA or RNA is then cleaved with a series of restriction enzymes that cleave infrequently in the genome and not near any of the markers being assayed. The DNA or RNA is then separated (e.g., on an agarose gel) and transferred to a membrane. A labeled (e.g., by incorporating a radionucleotide) probe or probes specific for the SNP or mutation being detected is allowed to contact the membrane under a condition or low, medium, or high stringency conditions. Unbound probe is removed and the presence of binding is detected by visualizing the labeled probe.

[0699] b. Detection of Hybridization Using “DNA Chip” Assays

[0700] In some embodiments of the present invention, variant sequences are detected using a DNA chip hybridization assay. In this assay, a series of oligonucleotide probes are affixed to a solid support. The oligonucleotide probes are designed to be unique to a given SNP or mutation. The DNA sample of interest is contacted with the DNA “chip” and hybridization is detected.

[0701] In some embodiments, the DNA chip assay is a GeneChip (Affymetrix, Santa Clara, Calif.; See e.g., U.S. Pat. Nos. 6,045,996; 5,925,525; and 5,858,659; each of which is herein incorporated by reference) assay. The GeneChip technology uses miniaturized, high-density arrays of oligonucleotide probes affixed to a “chip.” Probe arrays are manufactured by Affymetrix's light-directed chemical synthesis process, which combines solid-phase chemical synthesis with photolithographic fabrication techniques employed in the semiconductor industry. Using a series of photolithographic masks to define chip exposure sites, followed by specific chemical synthesis steps, the process constructs high-density arrays of oligonucleotides, with each probe in a predefined position in the array. Multiple probe arrays are synthesized simultaneously on a large glass wafer. The wafers are then diced, and individual probe arrays are packaged in injection-molded plastic cartridges, which protect them from the environment and serve as chambers for hybridization.

[0702] The nucleic acid to be analyzed is isolated, amplified by PCR, and labeled with a fluorescent reporter group. The labeled DNA is then incubated with the array using a fluidics station. The array is then inserted into the scanner, where patterns of hybridization are detected. The hybridization data are collected as light emitted from the fluorescent reporter groups already incorporated into the target, which is bound to the probe array. Probes that perfectly match the target generally produce stronger signals than those that have mismatches. Since the sequence and position of each probe on the array are known, by complementarity, the identity of the target nucleic acid applied to the probe array can be determined.

[0703] In other embodiments, a DNA microchip containing electronically captured probes (Nanogen, San Diego, Calif.) is utilized (See e.g., U.S. Pat. Nos. 6,017,696; 6,068,818; and 6,051,380; each of which are herein incorporated by reference). Through the use of microelectronics, Nanogen's technology enables the active movement and concentration of charged molecules to and from designated test sites on its semiconductor microchip. DNA capture probes unique to a given SNP or mutation are electronically placed at, or “addressed” to, specific sites on the microchip. Since DNA has a strong negative charge, it can be electronically moved to an area of positive charge.

[0704] First, a test site or a row of test sites on the microchip is electronically activated with a positive charge. Next, a solution containing the DNA probes is introduced onto the microchip. The negatively charged probes rapidly move to the positively charged sites, where they concentrate and are chemically bound to a site on the microchip. The microchip is then washed and another solution of distinct DNA probes is added until the array of specifically bound DNA probes is complete.

[0705] A test sample is then analyzed for the presence of target DNA molecules by determining which of the DNA capture probes hybridize, with complementary DNA in the test sample (e.g., a PCR amplified gene of interest). An electronic charge is also used to move and concentrate target molecules to one or more test sites on the microchip. The electronic concentration of sample DNA at each test site promotes rapid hybridization of sample DNA with complementary capture probes (hybridization may occur in minutes). To remove any unbound or nonspecifically bound DNA from each site, the polarity or charge of the site is reversed to negative, thereby forcing any unbound or nonspecifically bound DNA back into solution away from the capture probes. A laser-based fluorescence scanner is used to detect binding,

[0706] In still further embodiments, an array technology based upon the segregation of fluids on a flat surface (chip) by differences in surface tension (ProtoGene, Palo Alto, Calif.) is utilized (See e.g., U.S. Pat. Nos. 6,001,311; 5,985,551; and 5,474,796; each of which is herein incorporated by reference). Protogene's technology is based on the fact that fluids can be segregated on a flat surface by differences in surface tension that have been imparted by chemical coatings. Once so segregated, oligonucleotide probes are synthesized directly on the chip by ink-jet printing of reagents. The array with its reaction sites defined by surface tension is mounted on a X/Y translation stage under a set of four piezoelectric nozzles, one for each of the four standard DNA bases. The translation stage moves along each of the rows of the array and the appropriate reagent is delivered to each of the reaction site. For example, the A amidite is delivered only to the sites where amidite A is to be coupled during that synthesis step and so on. Common reagents and washes are delivered by flooding the entire surface and then removing them by spinning.

[0707] DNA probes unique for the SNP or mutation of interest are affixed to the chip using Protogene's technology. The chip is then contacted with the PCR-amplified genes of interest. Following hybridization, unbound DNA is removed and hybridization is detected using any suitable method (e.g., by fluorescence de-quenching of an incorporated fluorescent group).

[0708] In yet other embodiments, a “bead array” is used for the detection of polymorphisms (Illumina, San Diego, Calif.; See e.g., PCT Publications WO 99/67641 and WO 00/39587, each of which is herein incorporated by reference). Illumina uses a BEAD ARRAY technology that combines fiber optic bundles and beads that self-assemble into an array. Each fiber optic bundle contains thousands to millions of individual fibers depending on the diameter of the bundle. The beads are coated with an oligonucleotide specific for the detection of a given SNP or mutation. Batches of beads are combined to form a pool specific to the array. To perform an assay, the BEAD ARRAY is contacted with a prepared subject sample (e.g., DNA). Hybridization is detected using any suitable method.

[0709] C. Enzymatic Detection of Hybridization

[0710] In some embodiments of the present invention, hybridization is detected by enzymatic cleavage of specific structures (INVADER assay, Third Wave Technologies; See e.g., U.S. Pat. Nos. 5,846,717, 6,090,543; 6,001,567; 5,985,557; and 5,994,069; each of which is herein incorporated by reference). The INVADER assay detects specific DNA and RNA sequences by using structure-specific enzymes to cleave a complex formed by the hybridization of overlapping oligonucleotide probes. Elevated temperature and an excess of one of the probes enable multiple probes to be cleaved for each target sequence present without temperature cycling. These cleaved probes then direct cleavage of a second labeled probe. The secondary probe oligonucleotide can be 5′-end labeled with a fluorescent dye that is quenched by a second dye or other quenching moiety. Upon cleavage, the de-quenched dye-labeled product may be detected using a standard fluorescence plate reader, or an instrument configured to collect fluorescence data during the course of the reaction (i.e., a “real-time” fluorescence detector, such as an ABI 7700 Sequence Detection System, Applied Biosystems, Foster City, Calif.).

[0711] The INVADER assay detects specific mutations and SNPs in unamplified genomic DNA. In an embodiment of the INVADER assay used for detecting SNPs in genomic DNA, two oligonucleotides (a primary probe specific either for a SNP/mutation or wild type sequence, and an INVADER oligonucleotide) hybridize in tandem to the genomic DNA to form an overlapping structure. A structure-specific nuclease enzyme recognizes this overlapping structure and cleaves the primary probe. In a secondary reaction, cleaved primary probe combines with a fluorescence-labeled secondary probe to create another overlapping structure that is cleaved by the enzyme. The initial and secondary reactions can run concurrently in the same vessel. Cleavage of the secondary probe is detected by using a fluorescence detector, as described above. The signal of the test sample may be compared to known positive and negative controls.

[0712] In some embodiments, hybridization of a bound probe is detected using a TAQMAN assay (PE Biosystems, Foster City, Calif.; See e.g., U.S. Pat. Nos. 5,962,233 and 5,538,848, each of which is herein incorporated by reference). The assay is performed during a PCR reaction. The TAQMAN assay exploits the 5′-3′ exonuclease activity of DNA polymerases such as AMPLITAQ DNA polymerase. A probe, specific for a given allele or mutation, is included in the PCR reaction. The probe consists of an oligonucleotide with a 5′-reporter dye (e.g., a fluorescent dye) and a 3′-quencher dye. During PCR, if the probe is bound to its target, the 5′-3′ nucleolytic activity of the AMPLITAQ polymerase cleaves the probe between the reporter and the quencher dye. The separation of the reporter dye from the quencher dye results in an increase of fluorescence. The signal accumulates with each cycle of PCR and can be monitored with a fluorimeter.

[0713] In still further embodiments, polymorphisms are detected using the SNP-IT primer extension assay (Orchid Biosciences, Princeton, N.J.; See e.g., U.S. Pat. Nos. 5,952,174 and 5,919,626, each of which is herein incorporated by reference). In this assay, SNPs are identified by using a specially synthesized DNA primer and a DNA polymerase to selectively extend the DNA chain by one base at the suspected SNP location. DNA in the region of interest is amplified and denatured. Polymerase reactions are then performed using miniaturized systems called microfluidics. Detection is accomplished by adding a label to the nucleotide suspected of being at the SNP or mutation location. Incorporation of the label into the DNA can be detected by any suitable method (e.g., if the nucleotide contains a biotin label, detection is via a fluorescently labeled antibody specific for biotin).

[0714] 5. Other Detection Assays

[0715] Additional detection assays that are produced and utilized using the systems and methods of the present invention include, but are not limited to, enzyme mismatch cleavage methods (e.g., Variagenics, U.S. Pat. Nos. 6,110,684, 5,958,692, 5,851,770, herein incorporated by reference in their entireties); polymerase chain reaction; branched hybridization methods (e.g., Chiron, U.S. Pat. Nos. 5,849,481, 5,710,264, 5,124,246, and 5,624,802, herein incorporated by reference in their entireties); rolling circle replication (e.g., U.S. Pat. Nos. 6,210,884 and 6,183,960, herein incorporated by reference in their entireties); NASBA (e.g., U.S. Pat. No. 5,409,818, herein incorporated by reference in its entirety); molecular beacon technology (e.g., U.S. Pat. No. 6,150,097, herein incorporated by reference in its entirety); E-sensor technology (Motorola, U.S. Pat. Nos. 6,248,229, 6,221,583, 6,013,170, and 6,063,573, herein incorporated by reference in their entireties); cycling probe technology (e.g., U.S. Pat. Nos. 5,403,711, 5,011,769, and 5,660,988, herein incorporated by reference in their entireties); Dade Behring signal amplification methods (e.g., U.S. Pat. Nos. 6,121,001, 6,110,677, 5,914,230, 5,882,867, and 5,792,614, herein incorporated by reference in their entireties); ligase chain reaction (Bamay Proc. Natl. Acad. Sci USA 88, 189-93 (1991)); and sandwich hybridization methods (e.g., U.S. Pat. No. 5,288,609, herein incorporated by reference in its entirety).

[0716] 6. Mass Spectroscopy Assay

[0717] In some embodiments, a MassARRAY system (Sequenom, San Diego, Calif.) is used to detect variant sequences (See e.g., U.S. Pat. Nos. 6,043,031; 5,777,324; and 5,605,798; each of which is herein incorporated by reference). DNA is isolated from blood samples using standard procedures. Next, specific DNA regions containing the mutation or SNP of interest, about 200 base pairs in length, are amplified by PCR. The amplified fragments are then attached by one strand to a solid surface and the non-immobilized strands are removed by standard denaturation and washing. The remaining immobilized single strand then serves as a template for automated enzymatic reactions that produce genotype specific diagnostic products.

[0718] Very small quantities of the enzymatic products, typically five to ten nanoliters, are then transferred to a SpectroCHIP array for subsequent automated analysis with the SpectroREADER mass spectrometer. Each spot is preloaded with light absorbing crystals that form a matrix with the dispensed diagnostic product. The MassARRAY system uses MALDI-TOF (Matrix Assisted Laser Desorption Ionization—Time of Flight) mass spectrometry. In a process known as desorption, the matrix is hit with a pulse from a laser beam. Energy from the laser beam is transferred to the matrix and it is vaporized resulting in a small amount of the diagnostic product being expelled into a flight tube. As the diagnostic product is charged when an electrical field pulse is subsequently applied to the tube they are launched down the flight tube towards a detector. The time between application of the electrical field pulse and collision of the diagnostic product with the detector is referred to as the time of flight. This is a very precise measure of the product's molecular weight, as a molecule's mass correlates directly with time of flight with smaller molecules flying faster than larger molecules. The entire assay is completed in less than one thousandth of a second, enabling samples to be analyzed in a total of 3-5 second including repetitive data collection. The Spec troTYPER software then calculates, records, compares and reports the genotypes at the rate of three seconds per sample.

[0719] In some embodiments, the present invention provides an oligonucleotide comprising a DME related sequence, or a complement of a DME-related sequence. In preferred embodiments, an oligonucleotide of the present invention comprises a sequence or a complement of a sequence selected from the group consisting SEQ ID NOs. 1-3360 and 3361-7669, or a substantially similar sequence.

[0720] In some embodiments, an oligonucleotide probe or oligonucleotide primer is created so the 5′ terminus, 3′ terminus or central base contains the genetic polymorphism site. In some preferred embodiments, an oligonucleotide is created comprising at least 13 contiguous bases of a sequence selected from SEQ ID NOs 1 through 3360 and 3361-7669, or the complement thereto, and further comprising the 21^{st} nucleotide of the sequence selected from SEQ ID NOs 1 through 3360 and 3661-7669, or the complement thereto.

[0721] In some embodiments, an oligonucleotide of the present invention flanks or is adjacent to a polymorphic site, such that the presence of the polymorphism can be detected by modification of the oligonucleotide in a manner dependent on the presence or absence of the polymorphism.

[0722] In some embodiments, the present invention provides kits comprising one or more of the components necessary for practicing the present invention. For example, the present invention provides kits for storing or delivering the enzymes of the present invention and/or the reaction components necessary to practice a cleavage assay (e.g., the INVADER assay). The kit may include any and all components necessary or desired for the enzymes or assays including, but not limited to, the reagents themselves, buffers, control reagents (e.g., tissue samples, positive and negative control target oligonucleotides, etc.), solid supports, labels, written and/or pictorial instructions and product information, inhibitors, labeling and/or detection reagents, package environmental controls (e.g., ice, desiccants, etc.), and the like. In some embodiments, the kits provide a sub-set of the required components, wherein it is expected that the user will supply the remaining components. In some embodiments, the kits comprise two or more separate containers wherein each container houses a subset of the components to be delivered. For example, a first container (e.g., box) may contain an enzyme (e.g., structure specific cleavage enzyme in a suitable storage buffer and container), while a second box may contain oligonucleotides (e.g., INVADER oligonucleotides, probe oligonucleotides, control target oligonucleotides, etc.). In some embodiments one or more the reaction components may be provided in a predispensed format (i.e., pre-measured for use in a step of the procedure without re-measurement or re-dispensing). In some embodiments, selected reaction components are mixed and predispensed together. In preferred embodiments, predispensed reaction components are predispensed and are provided in a reaction vessel (including but not limited to a reaction tube or a well, as in, e.g., a microtiter plate). In particularly preferred embodiments, predispensed reaction components are dried down (e.g., desiccated or lyophilized) in a reaction vessel.

[0723] Examples of genetic polymorphism data (especially the SNP data) that can be used in the method of the present invention are shown in Table 1.

[0724] In Table 1, the name of the gene encoding the drug metabolizing enzyme is recorded in the gene name column. The base in capital letters is the SNP data in the sequence column. Two bases separated by a forward slash indicate the SNP of homo and hetero bases. For example, A/G indicates a homo allele A/A and G/G as well as a hetero allele A/G. The sequences in this table have 20 bases before and after the SNP. Here, the base in parentheses, for example the 26th (T) in ABCB4, indicates a polymorphism with an inserted base, and D, such as the 10th spot in NAT2, indicates a polymorphism with a deleted base. In Sequence No. 674, n is VNTR and (cctgy)x, where x is an integer between 1 and 50, indicates a repeated sequence. The bases with numbers in parentheses indicate the number of times they are repeated. For example, “(T) 9-12” in Sequence No. 1552 (ABCB11 No. 55 in Table 1) indicates T is repeated 9 to 12 times.

[0725] Here, “position” indicates the position of the SNP genome. The position of SNPs in the 5′ flanking region, intron region and 3′ flanking region are intron base sequences counted as a single number starting at the exon-intron junction. The position of SNPs in the exon region are exon base sequences counted as a single number starting at the exon-intron junction. Also, (+) or no symbol indicates a number counted in the 3′ upstream direction and (−) indicates a number counted in the 5′ downstream direction. The number in the “number” column indicates the position of the SNP in the gene maps of the various genes (FIG. 9 through FIG. 141 and FIG. 144 through 312).

[0726] The sequence represented by the SEQ ID Nos. 1-3360 and 3361-7669 can readily be associated with the corresponding gene, chromosome, and chromosomal position. Each of the genes shown in Table 1 correlates to a corresponding Figure in the present application. The Figures show a map of the gene with positional identifiers for each of the polymorphisms. The Figures also provide an accession number that correlates to public genome databases, allowing the genetic context of the polymorphism and the gene to be understood. Using the information in Table 1, the Figures, and public genome databases, one skilled in the art is able to identify flanking sequences. This allows, for example, the development of PCR primers that flank the polymorphism. Considerations for PCR primer design are known in the art for both single PCR reactions and multiplex reactions (See e.g., Henegariu et al., BioTechniques 23:504-511 [1997] and PCR Applications, edited by Innis, Gelfand, and Sninsky, Academic Press, San Diego, Calif. 1999), each of which is herein incorporated by references in its entirety). Examples of primers that find use in the amplification of sequences containing polymorphisms, as well as amplification conditions, are found at the IMS-JST JSNP database website (See, submissions from Laboratory for Genotyping, The SNP Research Center, The Institute of Physical and Chemical Research (RIKEN)).

[0727] One example of information generated using SEQ ID Nos. 1-3360 and 3361-7669 and information in publicly available databases is provided in FIG. 143. The first column in this figure shows that 3360 entries are made, corresponding to the first 3360 entries found in Table 1. The second column, entitled “GENE” provides a gene name abbreviation, while the next column provides a long gene name. The next columns show the chromosome (CHROM), a reference mRNA accession number (REF.MRNA), a locus link database accession number (L-LINK), an OMIM database accession number (OMIM_ID) which allows disease association information to be readily obtained, the exon count for the gene (EXONS), and the number of polymorphisms in the gene (NO GENE).

[0728] Creating an Oligonucleotide Probe or Oligonucleotide Primer

[0729] In some embodiments, an oligonucleotide used as a primer and/or probe in the detection method of the present invention serves as the template of the base sequences (Sequence No. 1 through 3360 and 3361 through 7669) shown in Table 1 if, for example, a SNP is to be detected. The primer/probe can be designed so it is synthesized as the base sequence itself or as a portion of the base sequence. In preferred embodiments, the SNP is included in the base sequence of the primer/probe (and denoted in capital letters in the base sequence column of Table 1). The primers/probes may also be complementary to the non-mutant sequence.

[0730] The SNP in the following example is designed so it is on the 3′ or 5′ end of the base sequence. It is designed to be within four bases of the 3′ or 5′ end, and ideally within two bases of the end. The SNP can also be in the center of the oligonucleotide base sequence. Here, “center” means the number of the bases from the SNP base to the 5′ end is substantially equal to the number of bases from the SNP base to the 3′ end. If there is an odd number of bases in the oligonucleotide, the central region should be essentially five bases in length, preferably three bases in length, and ideally one base in length. In a base sequence with 41 bases, for example, the central region should be bases 19 through 23, preferably bases 20 through 22, and ideally base 21. If there is an even number of bases, the central region should be four bases and ideally two bases. In a base sequence of 40 bases, for example, the central region should be bases 19 through 22 and ideally base 20.

[0731] If the polymorphism consists of a plurality of bases, in some embodiments, the probe/primer is designed so the full polymorphism sequence is contained in the probe/primer. In some preferred embodiments, it is designed so one of the bases 1 through 4 on the 5′ end or 3′ end complementing the primer DNA corresponds to the base at the very end of the polymorphism bases. (This is called the “corresponding base”; ideally, it is the base at the 5′ or 3′ end). For example, in the INVADER assay, if a probe and INVADER oligonucleotide are prepared to detect a genetic polymorphism (CAGAGGCT) in No. 12 of NDUFA7 in Table 1 (Sequence No. 828), the position of the corresponding base in the probe in FIG. 4a (a “T” base in the figure) is designed to become “C” at the far left of sequence CAGAGGCT, and the N base in the INVADER oligonucleotide shown in FIG. 4b is designed to replace the “C” at the far left of CAGAGGCT with A, T, C or G). Conversely, if designed so the position of the corresponding base in the INVADER oligonucleotide is the far right “T” in CAGAGGCT, the “N” base is such that the corresponding base in the probe is “T.” Further, the corresponding base of the INVADER oligonucleotide and the allele probe can be set anywhere in the CAGAGGCT sequence.

[0732] In preferred embodiments, the length of the base sequence is at least 13 bases, preferably between 13 and 60 bases, more preferably between 15 and 40 bases, and ideally between 18 and 30 bases. These oligonucleotide base sequences can be used as probes, as forward (sense) primers or as reverse (anti-sense) primers to detect target genes.

[0733] These oligonucleotides can link regions hybridized with genome DNA in tandem to unhybridized regions. The linking order can be upstream or downstream. The hybridized regions in these oligonucleotides can be designed from base sequence data containing the SNP described in Table 1, and created so the sequence containing the region hybridized with genome DNA closest to the 5′ or 3′ end is the SNP. These oligonucleotides can be used as probes to detect SNP using the INVADER assay.

[0734] The primer used in some embodiments of the present invention is designed to determine the functional change caused by the SNPs in the base sequences in Table 1, to determine whether the change is effective or ineffective, and to determine the existence of side effects. It is designed to include the SNP in the PCR-amplified base sequence. In some preferred embodiments, the primer should have at least 15 base sequences, preferably between 15 and 30 base sequences, and ideally between 18 and 24 base sequences. The template DNA regions in the primer base sequence should contain 500 bp or less amplified fragments, preferably between 100 and 300 bp fragments, and ideally between 100 and 150 bp fragments.

[0735] The oligonucleotide probes and primers designed in this manner can be synthesized chemically using any method commonly known in the art. For example, the oligonucleotides can be synthesized using a commercially available chemical synthesis device. The production of probes can be conducted automatically by adding fluorescent tags (e.g., FAM, VIC, Cy3) or other labels.

[0736] These oligonucleotides can be included in genetic polymorphism detection kits along with polymerase (e.g., Taq polymerase), a buffering solution (e.g., a Tris buffering solution), dNTP, fluorescent dyes (e.g., VIC, FAM), or other desired kit components.

[0737] Detection

[0738] In some embodiments, the oligonucleotides prepared in the examples above are used as primers/probes, and the genes or a portion thereof (template DNA) encoding the drug metabolizing enzyme is amplified using DNA polymerase. A primer/probe prepared in this manner can be hybridized with template DNA and used to detect DNA with the target genetic polymorphism. The DNA used as the template can be prepared using any method commonly known in the art. Examples include cesium chloride density gradient ultra centrifugation method, the SDS solvency method or the phenol chloroform extraction method.

[0739] 1 Detection Using PCR

[0740] The amplification can be performed using a polymerase chain reaction (PCR). The DNA polymerase can be LA Taq DNA polymerase (Takara), Ex Taq polymerase (Takara), AMPLITAQ Gold polymerase (Applied Biosystems), AMPLITAQ (Applied Biosystems) or Pfu DNA polymerase (Stratagene), as well as other polymerases.

[0741] An illustrative example of amplification conditions is provided below. The present invention is not limited to the conditions provided in this example. In preferred embodiments, each cycle in the transforming phase should last between 10 and 40 seconds at 85° C. to 105° C. and preferably 20 and 30 seconds at 94° C., each cycle in the annealing phase should last 30 seconds to 1 minute at 50° C. to 72° C. and preferably 20 seconds to 1 minute at 60° C., and each cycle in the elongation phase should last 1 minute to 4 minutes between 65° C. and 75° C. and preferably 2 minutes to 3 minutes at 72° C. There should be 30 to 40 cycles, although fewer or more cycles are contemplated. In order to completely transform the template DNA and the primer, each cycle in the transforming phase should last 1 minute to 5 minutes at 95° C. before the amplifying cycle. If AMPLITAQ GOLD polymerase manufactured by Applied Biosystems is used, it should last from 8 minutes to 15 minutes and ideally from 10 minutes to 12 minutes. In order to completely elongate the amplified DNA, the elongation phase should last between 1 minute and 10 minutes at 72° C. after the amplification cycle. If the amplified product is not immediately detected, it should be processed again at 4° C. to make sure the amplification was not irregular. In this way, the gene encoding the drug metabolizing enzyme is amplified.

[0742] After amplification, gel electrophoresis is performed on the amplified product, the amplified product is stained using ethidium bromide or SYBR Green, and one, two or three bands are detected in the amplified product (DNA fragments) to determine the portion (DNA fragment) of the drug metabolizing enzyme containing the genetic polymorphism in the gene encoding the drug metabolizing enzyme. Polyacrylamide gel electrophoresis or capillary electrophoresis can be performed instead of aerogel electrophoresis. PCR can be performed using a primer tagged with a fluorescent dye to detect the amplified product. A detection method that does not require electrophoresis can also be used, such as bonding the amplified product in solid phase to a microplate and detecting the amplified product using a fluorescent or enzymatic reaction.

[0743] 2. Detection Using the TAQMAN PCR Method

[0744] In the TAQMAN PCR method, the PCR reaction is performed using a fluorescent dye-tagged allele-specific oligo and Taq DNA polymerase. The allele-specific oligo used in the TAQMAN PCR method (TAQMAN probe) can be designed based on the SNP data. The 5′ end of the TAQMAN probe is tagged using a fluorescent reporter dye R such as FAM or VIC, and the 3′ end is tagged using a quencher Q (light-quenching substance). (See FIG. 1.). Here, the fluorescent light energy absorbed by the quencher is not detected. Because the 3′ end of the TAQMAN probe is phosphorylated, there is no elongation reaction from the TAQMAN probe in the PCR reaction (FIG. 1). However, a PCR reaction is performed on the TAQMAN probe with TaqDNA polymerase and a primer designed to amplify the region containing the SNP. The following reaction occurs.

[0745] First, the TAQMAN probe is hybridized in a specific sequence of template DNA (FIG. 2a) and an elongation reaction is simultaneously performed from the PCR primer (FIG. 2b). Because the Taq DNA polymerase has 5′ nuclease activity, the hybridized TAQMAN probe is severed as the PCR primer elongation reaction continues. When the TAQMAN probe is severed, the quencher has no effect on the fluorescent dye, and the fluorescent light is detected (FIG. 2c).

[0746] For example, suppose there is an A allele (Allele 1) and a G allele (Allele 2) at the SNP position as shown in FIG. 3. Allele 1 is tagged by a specific TAQMAN probe with FAM and Allele 2 is tagged by a specific TAQMAN probe with VIC (see FIG. 3). Two different allele-specific oligos are added to the PCR drug, and TAQMAN PCR is performed on the detected template. The fluorescence detector then detects the fluorescent intensity of the FAM and VIC. When the SNP position in the allele and the position corresponding to the SNP in the TAQMAN probe are complementary, the probe is hybridized with the allele, the fluorescent dye in the probe is severed by the Taq polymerase, the effect of the quencher is eliminated, and the intensity of the fluorescence is detected.

[0747] If the template is homozygous for Allele 1, strong FAM fluorescence is detected and hardly any VIC fluorescence is detected. If the template is heterozygous for Allele 1 and Allele 2, both FAM and VIC fluorescence are detected.

[0748] 3. SNP Detection Using the INVADER Assay

[0749] In the INVADER assay, an allele-specific oligo and the template are hydridized to detect the SNP. In the INVADER assay, two different non-tagged oligos and one fluorescent dye-tagged oligo are used. One of the two non-tagged oligos is known as the probe. In some embodiments, the probe has a. region hybridized to the genome DNA (template DNA) and a region (called a flap) that is not hydridized with the genome DNA, and that has a sequence unrelated to the sequence of the genomic DNA. The hybridized region has base sequences corresponding to the SNP (FIG. 4a). The flap sequence is complementary to a FRET probe (described below). The other of the two non-tagged oligos is called the INVADER oligonucleotide. This oligonucleotide is designed so that it is hybridized in complementary fashion from the SNP position towards the 3′ end of the genome DNA (FIG. 4b). In some preferred embodiments, the sequence corresponding to the SNP position can be any base (denoted by N in FIG. 4b). When the template DNA genome is hybridized with the two probes, the base (N) from the INVADER oligonucleotide is inserted in the SNP position (FIG. 4c) forming a cleavage structure at the SNP position.

[0750] In some embodiments, the fluorescent dye-tagged oligonucleotide is a sequence completely unrelated to the alleles. This probe is a FRET (fluorescence resonance energy transfer) probe (FIG. 5). The fluorescent dye R tags the base (reporter) at the 5′ end of the FRET prove. A quencher Q absorbs the fluorescence. Here, the quencher absorbs the fluorescent light and the light is not detected. A specific region (Region 1) is designed on the 5′ end of the FRET probe (reporter base) to face the 3′ end from Region 1 (This region is Region 2). As a result, Region 1 and Region 2 form a complementary duplex (FIG. 5). The 3′-region from the regions forming the complementary duplex can be hybridized with the flap of the allele probe to form a complementary chain (FIG. 5).

[0751] In the INVADER assay, a cleavage agent (e.g., CLEAVASE enzyme, Third Wave Technologies, Madison, Wis.) is used, which is an enzyme (5′ nuclease) with specific endonuclease activity for identifying and cleaving a specific DNA structure. When the genome DNA, the probe and the INVADER oligonucleotide form a cleavage structure at the SNP position, the cleavage agent severs 3′ of the SNP position on the allele probe. The section with three bases forming a flap with the 5′ end is identified as shown in FIG. 4c, and the flap is severed. The structure with the SNP position is identified by the cleavage agent (FIG. 6a), the probe is severed at the flap position, and the flap is separated (FIG. 6b). Next, the released flap from the probe bonds with the FRET probe in complementary fashion to form a duplex (FIG. 6c). The cleavage agent identifies this structure and cleaves the section with the fluorescent dye. The cleaved fluorescent dye is no longer affected by the quencher and fluorescent light becomes detectable (FIG. 6d). If the SNP position does not match the sequence corresponding to the SNP in the allele probe as shown in FIG. 7, the specific DNA structure is not identified by the cleavage agent, the probe is not severed, and fluorescent light is not detected.

[0752] When the SNP is T/C, for example, a T INVADER oligonucleotide, a T probe, a FRET probe with FAM bonded to the reporter for the T SNP, a C INVADER oligonucleotide, a C probe and a FRET probe with VIC bonded to the reporter for the C SNP are prepared. These are combined and SNP detection is performed. If there is a T/T homo, FAM fluorescence is generated. If there is a C/C homo, VIC fluorescence is detected. If there is a T/C hetero, both FAM and VIC fluorescence are detected. Because the FAM and VIC fluorescence wavelengths are different, both can be readily identified.

[0753] Detection Using the SniPer Method

[0754] In order to detect SNP using the SniPer method, an allele identifier is amplified using RCA. The genome DNA template is a straight chain, and a probe is hybridized with the genome DNA. When there is a complementary match between the probe sequence and the genome DNA template sequence and a complementary chain forms, a ligation reaction on the genome DNA forms a ring. As a result, RCA continues on cyclic DNA. If the end of the probe does not match the genome DNA, the RCA reaction does not occur because there is no ligation and no ring. In the SniPer method, therefore, a single chain probe is designed to anneal the genome DNA and create a ring. This single chain probe is called a padlock probe. The severed end of the padlock probe is the sequence corresponding to the target SNP. The padlock probe and the genome DNA mix and a ligation reaction occurs. If the severed end of the padlock probe and the SNP section of the genome DNA are complementary, the severed end of the padlock probe connects and forms a ring during the ligation reaction. If they are not complementary, a ring does not form. Therefore, only a padlock probe corresponding to the target SNP forms a ring and is amplified by the DNA polymerase. The presence of amplification is used to detect the SNP. A synthetic oligonucleotide with a hairpin structure and a fluorescent dye and quencher on both ends can be used in the detection process.

[0755] Detection Using the MALDI-TOF/MS Method

[0756] In the matrix assisted laser desorption-time of flight/mass spectroscopy (MALDI-TOF/MS) method, SNP typing is performed using a mass spectrometer. A preferred embodiments of this method has the following steps.

[0757] (i) PCR Amplification and Refinement of DNA Fragments Containing SNP

[0758] After making sure the base at the SNP location and the PCR primer do not overlap, the DNA fragment is amplified, exonuclease or alkali phosphatase processing is performed on the amplified product, the dNTP is removed, and the amplified fragment is refined.

[0759] (ii) Primer Extension Reaction (Thermal Cycle) and Refinement

[0760] A primer ten or more times the template in the region identified as the PCR product is added, a thermal cycle reaction is performed, and a primer elongation reaction is performed. The primer used here is designed so the 3′ end is next to the base corresponding to the SNP position. The primer length should be 15 to 30 bases, ideally 20 to 25 bases. If there is a multiplex reaction, a sequence that is not complementary to the template is added to the 5′ end. There should be 20 to 30 (ideally 25) thermal cycles at two different temperatures. These should be 85 to 105° C. (ideally 94° C.) and 35 to 40° C. (ideally 37° C.).

[0761] The reaction product is then refined using a refining kit so it can be used in the mass spectrometer.

[0762] (iii) Mass Spectroscopy Using a Mass Spectrometer

[0763] The elongated and refined reaction product is applied to the mass spectrometer, and a quality of the target product is measured. In other words, the refined product is mixed with the matrix and 0.5 to 1.0 mL spots are formed on the MALDI plate. After drying the plate, the substance is irradiated by a laser beam and a spectrogram is produced.

[0764] Detection Using the Base Sequence Determining Method

[0765] In the present invention, a polymorphism can be detected using an elongation reaction on a single base. In other words, four different types of dideoxynucleotides identified by different fluorescent compounds are added to reaction systems including the gene to be detected and a single base elongation reaction is performed. Here, the base to be elongated is the polymorphism. Two reactions are performed; one to stop the DNA synthesis and another to identify the 3′ end of the DNA molecule with fluorescence. Electrophoresis is performed on four different reaction solutions with the same lanes and capillaries for the sequencing gel. The sequence is determined by detecting the differences in the fluorescent dyes identifying the DNA bands using a fluorescence detector. The oligonucleotides with one base elongated have the elongation confirmed using different types of fluorescent dyes in a fluorescence detector and mass spectrometer. Instead of fluorescent-tagged dideoxynucleotides, the primer can be identified using fluorescence used with non-tagged dideoxynucleotides.

[0766] Drug Evaluation

[0767] Using information obtained by the methods of the present invention, the efficacy and stability of the drug metabolized by the drug metabolizing enzyme can be evaluated.

[0768] For example, in some embodiments, the drug can be evaluated using a typing system. In other words, the frequency of expressed and unexpressed alleles (e.g., toxic alleles that cause undesired side effects) can be compared using any one of the detection methods mentioned above. Once they have been compared, markers can be selected to indicate, for example, a toxic expression where the allele frequency differs. In statistical analysis, this is usually set as ×2. However, this is different in other methods such as the Fisher method. The active components (altered and metabolized drug components) in the drug will be reflected in blood and tissue concentrations. All of the genetic polymorphisms can be checked against the causes of the toxic effects to isolate specific correlating genetic polymorphisms. The substances corresponding to the probes or primers used to analyze all of the genetic polymorphisms are prepared beforehand on reaction plates, cards or glass plates, and unprepared human genome DNA is added and reacted to determine the allele pattern. If there are genetic polymorphisms correlating with toxicity or other phenotypes, then human side-effects can be expected or predicted. The same is true of drug effectiveness. Because the genetic polymorphisms correlating to effectiveness and side-effects differ depending on the drug, typing performed using genetic polymorphisms can be performed to anticipate effectiveness and side-effects.

[0769] Differences in allele frequency can be determined in certain instances by comparing the frequency of genetic polymorphisms to effectiveness/ineffectiveness or the presence/absence of side-effects. If, for example, an SNP analysis is performed on persons with a toxic reaction (side-effect) to Drug A, the results may show a 90% of the people have T/T (e.g., detected based on the intensity of fluorescent FAM light). The same results may show 10% of people with no toxic reaction have a T/T and 90% have a C/C. As a result of the SNP analysis, the evaluation may be not to administer Drug A to persons with T/T.

[0770] Drug Screening

[0771] In the present invention, the genetic polymorphism data obtained as described above is compared to genetic polymorphism data from genes encoding certain drug metabolizing enzymes to indicate the safety and effectiveness of drugs metabolized by these drug metabolizing enzymes. Therefore, the genetic polymorphism data obtained using the method of the present invention can be used to determine the likely effectiveness of certain drug therapies and to select the appropriate drug.

[0772] The evaluation methods described above can be used. Genetic polymorphisms with correlations to side-effects and effectiveness are said to be influenced by the activation, transfer and translation of certain enzymes. The cause and effect relationship with the side-effect or effectiveness expression mechanism may be indirect. The metabolization of drugs is being studied by pharmaceutical companies in laboratory and clinical testing. If there are genetic polymorphisms in enzyme genes correlating with severe side-effects, they can be removed and used under different conditions. The same is true of effectiveness. Drugs can be screened, therefore, using side-effects and effectiveness data. A wide variety of conditions and diseases (See e.g., Physician's Desk Reference) benefit from analysis using the systems and methods of the present invention.

[0773] In some embodiments of the present invention, a sample is taken from a subject (e.g., by a drug company) and sent to a laboratory for analysis using a detection assay. The laboratory results (e.g., detection assay test result data) is returned to the party providing the sample such that an appropriate decision can be made, including, but not limited to, development or administration of a drug to a subject.

[0774] In clinical testing (Tests I through III), the frequency of the expression of genetic polymorphisms can be studied in volunteers exhibiting certain side-effects and volunteers not exhibiting the same side-effects to a drug. In this way, novel genetic polymorphisms correlating with side-effects and effectiveness can be detected. This information can be used to screen drugs. Exemplary drugs and drug-related data and other information that find use in or with the present invention, including but are not limited to the methods and databases described herein, are described in the PHYSICIANS' DESK REFERENCE (PDR). (e.g., 2002 Edition, Medical Economics Company, Inc., Montvale, N.J.). The PDR is expressly incorporated by reference herein as if fully set forth.

### EXPERIMENTAL EXAMPLES

[0775] The following examples are provided in order to demonstrate and further illustrate certain preferred embodiments and aspects of the present invention and are not to be construed as limiting the scope thereof.

### Example 1

### Obtaining SNP Data

[0776] (1) DNA Extraction

[0777] Blood was extracted from 48 unrelated people in the presence of EDTA. The DNA was extracted in the following way based on the method in the Genome Analysis Manual (Yusuke Nakamura ed., Springer-Verlag Tokyo).

[0778] Ten milliliters of blood was transferred to a 50 ml test tube and centrifuged for five minutes at room temperature and 3000 rpm. After the supernatant (blood serum) had been removed using a pipette, 30 ml of RBC-dissolving buffer (10 mM NH4 HCO3, 144 mM NH3C1) was added. After mixing until there was no sediment, it was allowed to stand for 20 minutes at room temperature. After being centrifuged for five minutes at room temperature and 3000 rpm, the supernatant (blood serum) was again removed using a pipette to obtain white blood cells. Another 30 ml of RBC-dissolving buffer was added and the process was repeated twice. Then, 4 ml of proteinase K buffer [50 mM Tris-HCl (pH 7.4), 100 mM NaCl, 1 mM EDTA (pH 8.0)] was added to the white blood cells, 200 ml of SDS was added, 200 ml of 10 mg/ml proteinase K was added, and the solution was tumble-mixed. The solution was then allowed to stand overnight at 37° C. The next day, 4 ml of phenol was added, and the solution was slowly tumble-mixed for four hours using a Taitec T-50 Rotator. After being centrifuged for 10 minutes at room temperature and 3000 rpm, the supernatant was removed using a new tube. Then, 4 ml of phenol-chloroform-isoamylalcohol (volume ratio 25:24:1) was added, the solution was tumble-mixed for two hours in the manner described above, and the solution was centrifuged. The supernatant was removed using a new tube, 4 ml of chloroform-isoamylalcohol (volume ratio 24:1) was added, and the solution was tumble-mixed. Fibrous white precipitate (DNA) was removed using a 2 ml tube, 1 ml of 70% ethanol was added, and the solution was tumble-mixed. The DNA was transferred to a new tube, dried and dissolved in 500 ml of TE solution [10 mM Tris-HCl (pH 4.7), 1 mM EDTA (pH 7.4)] to obtain a genome DNA sample.

[0779] (2) PCR

[0780] A genome sequence was obtained from the GenBank DNA Database. After removing the repeating sequences using the RepMask computer program, the PCR primer was set so there would be approximately 1 kb of PCR product. The genome DNA from 48 unrelated people was prepared at the same concentration. After mixing the same amount of DNA from three people in a single tube, 60 ng was used in the PCR. The PCR was Ex-Taq (Takara 2.5 U) and performed using the GeneAmp PCR System 9700 (PE Applied Biosystems). After reacting for two hours at 94° C., denaturing was performed for 30 seconds at 96° C., annealing was performed for 30 seconds at 55° C. or 60° C., and elongation was performed for one minute at 72° C. in each cycle. There were 35 cycles.

[0781] (3) Sequence

[0782] After refining the PCR product using Arraylt (Telechem), the sequence reaction was performed using the BigDye Terminator RR Mix (PE Applied Biosystems). After reacting for two hours at 96° C., denaturing was performed for 20 seconds at 96° C., annealing was performed for 30 seconds at 50° C., and elongation was performed for 4 minutes at 60° C. in each cycle using the GeneAmp PCR System 9700 (PE Applied Biosysytems). There were 25 cycles. After the sequencing reaction, the sequencing was analyzed using the ABI Prism 3700 DNA Analyzer.

[0783] (4) SNP Detection

[0784] An analysis was performed on the SNP detection using the PolyPhred computer program (Nickerson et al., 1997, Nucleic Acid Res., 25, 2745-2751).

[0785] (5) Results

[0786] The SNP results shown in Table 1 were obtained. The analyzed drug metabolizing enzyme, the abbreviation of the enzyme, the databank (GenBank) accession number, the structure of the gene for the drug metabolizing enzyme, and the position of the SNPs are shown in FIG. 9 through FIG. 141 and FIG. 144 through 312. In FIG. 9 through FIG. 141 and FIG. 144 through 312, the exons are blank boxes or black lines in the genes denoted by the horizontal lines. The position of the SNPs is denoted above the genes with solid lines and numbers.

### Example 2

### Typing

[0787] Typing was performed on two different groups of patients using the INVADER assay. In FIG. 142, the x-axis (Allele 1) indicates the intensity of the FAM fluorescent light corresponding to T, and the x-axis (Allele 2) indicates the intensity of the VIC fluorescent light corresponding to C. The slanted line indicates the SNP pattern for T/T, the black circles denote the pattern for C/C, and the white circles denote the pattern for T/C. The black squares indicate the background values. The x marks indicate where the detection failed. The group of patients in the graph for panel A (top) had many C/C SNP patterns and the group of patients in the graph for panel B (bottom) had many T/T SNP patterns.

### Example 3

### SNP Detection

[0788] Genome DNA was extracted from five unrelated people using the method described in Example 1, and the SNPs in three different drug metabolizing enzyme genes (EPHX1, ABCB2, AANAT) were detected using the INVADER assay method. The INVADER oligonucleotides and probes were designed using base sequence No. 3 (Sequence No. 49) and No. 17 (Sequence No. 63) in the case of EPHX1, base sequence No. 4 (Sequence No. 4) and No. 11 (Sequence No. 11) in the case of ABCB2, and base sequence No. 3 (Sequence No. 561) in the case of AANAT. The positions of the SNPs are shown in Table 1.

[0789] The results are shown in Table 2.

TABLE 2

| | EPHX1 | | ABCB2 | | AANAT |
|---|---|---|---|---|---|
| Drug | No. 3 | No. 17 | No. 4 | No. 11 | No. 3 |
| Metabolizing | Seq. | Seq. | Seq. | Seq. | Seq. |
| Enzyme Gene | No. 49 | No. 63 | No. 4 | No. 11 | No. 561 |
| SNP | (T/G) | (A/G) | (G/T) | (G/A) | (T/A) |
| Subject I | T/T | A/G | T/T | G/A | T/T |
| Subject II | T/T | A/A | G/G | G/G | T/A |
| Subject III | T/G | A/A | G/G | A/A | T/T |
| Subject IV | G/G | A/G | G/T | G/G | T/T |
| Subject V | T/G | A/G | G/T | G/A | T/A |

[0790] As shown in Table 2, the SNPs in the drug metabolizing genes of patients can be detected and the patterns determined using the method of the present invention.

### Example 4

### Correlation Between SNP Genotypes and Optimal Amounts of a Medicament for Treatment Validity and Safety

[0791] In this example, validity and safety of medicaments were investigated using SNP analysis.

[0792] Thiopurine S-methyltransferase (TPMT) is an enzyme that transfers a methyl group to a sulfur atom attached to a purine ring, and is one of the major enzymes for metabolizing drugs such as the anti-cancer agents 6-mercaptopurine and 6-thioguanine, and thiopurine derivatives such as the immunosuppressive agent azathioprine. This example shows a correlation between optimal amounts of azathioprine and various combinations of the alleles at the 868^{th} SNP of intron 3 of TPMT (Seki, et al., J Hum Genet 45(5):299 [2000], incorporated by reference herein in its entirety; Accession No. AB045146.1) (G or T alleles) and the 2682^{nd} SNP of intron 3 (C or A alleles) (Table 3 and Table 4).

TABLE 3

| 868 | 2682 | High | Low |
|---|---|---|---|
| TT | AA | 2 | 0 |
| TT | AT | 3 | 0 |
| TT | TT | 1 | 0 |
| GT | AA | 0 | 2 |
| GT | AT | 1 | 7 |
| GT | TT | 4 | 1 |
| GG | AA | 1 | 0 |
| GG | AT | 0 | 1 |
| GG | TT | 1 | 0 |

[0793] Optimal amounts of azathioprine were determined by adopting suppression of rejection after renal transplantation as an index. A group of patients in which the validity of treatment with 100 mg/day of azathioprine was confirmed was designated as a high dose group, and a group of patients in which side effects developed with treatment of 100 mg/day, but in which validity was confirmed with a treatment of 50 mg/day was designated as a low dose group. Table 3 indicates the number of patients having each combination of alleles, with the columns labeled “High” and “Low” representing the numbers of patients of each genotype in the high dose and the low dose groups, respectively. Side effects include leukopenia, anthema, angiitis, nausea/vomiting, anorexia, diarrhea, malaise, myalgia, arthralgia, fever, chill, and dizziness. More serious side effects include, for example, blood disorders, shock-like symptoms, infectious diseases, and hepatic disorders, and renal disorders.

[0794] Investigation of a correlation between the high dose and low dose groups and the two types of SNPs indicated above revealed that when G is present in at least one allele at the 868^{th} SNP of intron 3 (G/G homozygous or G/T heterozygous) and A is present in at least one allele at the 2682^{nd} SNP of intron 3 (A/A homozygous or A/T heterozygous), side effects were developed with 100 mg/day and 50 mg/day was an optimal amount for 10 out of 12 patients (low dose group), while 100 mg/day was an optimal amount for 11 out of 12 patients with other allele combinations (high dose group) (Table 4). Investigation of this combination of two SNP loci in patients enables prediction of optimal amounts of azathioprine for treatment prior to the administration of the drug, for improved validity and safety. These results indicate that the validity and safety of medicaments can be predicted using analysis of SNPs associated with medicament metabolic enzymes, e.g., as described in this specification and including but not limited to the DME-associated SNPs listed in Table 1. As used in this example only, the term “optimal amount” refers to the best dosage selected from the tested amounts of 50 mg/day or 100/mg per day. It will be appreciated by those skilled in the art that a study testing additional amounts of a medicament (e.g., a study in which amounts are varied in smaller increments, such as 40, 50, 60, 70, 80, 90, etc. mg/day) would provide additional information regarding ranges of amounts giving optimal performance for patients having a particular genotype, and that optimal amounts of this or any other medicament are not limited to the particular amounts of 50 or 100 mg/day tested in this example.

TABLE 4

Optimal amount

| Genotype | 100 mg/day | 50 mg/day |
|---|---|---|
| G as the 868^{th} SNP and A | 2 | 10 |
| as the 2682^{nd} | | |
| Other combinations | 11 | 1 |

(Fisher exact test: p = 0.0003)

### Sequence Listing Free Text

[0795] SEQ ID NO:39: n indicates t (Position 21).

[0796] SEQ ID NO:64: n indicates c (Position 21).

[0797] SEQ ID NO:580: n indicates a or deletion (Position 21).

[0798] SEQ ID NO:634: n indicates a or deletion (Position 21).

[0799] SEQ ID NO:656: n indicates a or deletion (Position 21).

[0800] SEQ ID NO:658: n indicates c or deletion (Position 21).

[0801] SEQ ID NO:671: n indicates a or deletion (Position 21).

[0802] SEQ ID NO:672: n indicates g or deletion (Position 21).

[0803] SEQ ID NO:673: n indicates c or deletion (Position 21).

[0804] SEQ ID NO:674: n indicates (cctgy)x or deletion (Position 21).

[0805] SEQ ID NO:676: n indicates gaa or deletion (Position 21).

[0806] SEQ ID NO:677: n indicates ag or deletion (Position 21).

[0807] SEQ ID NO:785: n indicates ta. (Position 21).

[0808] SEQ ID NO:797: n indicates acac. (Position 21).

[0809] SEQ ID NO:806: n indicates gatttgtggtatccag. (Position 21).

[0810] SEQ ID NO:808: n indicates ag or deletion (Position 21).

[0811] SEQ ID NO:809: n indicates ta or deletion (Position 21).

[0812] SEQ ID NO:815: n indicates t (Position 21).

[0813] SEQ ID NO:828: n indicates cagaggct (Position 21).

[0814] SEQ ID NO:830: n indicates ca or deletion (Position 21).

[0815] SEQ ID NO:831: n indicates ag or deletion (Position 21).

[0816] SEQ ID NO:843: n indicates gtaaa (Position 21).

[0817] SEQ ID NO:845: n indicates a (Position 21).

[0818] SEQ ID NO:888: n indicates tc (Position 21).

[0819] SEQ ID NO:890: n indicates t or deletion (Position 21).

[0820] SEQ ID NO:913: n indicates t or deletion (Position 21).

[0821] SEQ ID NO:932: n indicates t or deletion (Position 21).

[0822] SEQ ID NO:933: n indicates t or deletion (Position 21).

[0823] SEQ ID NO:955: n indicates at or deletion (Position 21).

[0824] SEQ ID NO:956: n indicates a or deletion (Position 21).

[0825] SEQ ID NO:957: n indicates c or deletion (Position 21).

[0826] SEQ ID NO:987: n indicates c (Position 21).

[0827] SEQ ID NO:999: n indicates gtt or deletion (Position 21).

[0828] SEQ ID NO:1164: n indicates at (Position 21).

[0829] SEQ ID NO:1166: n indicates c or deletion (Position 21).

[0830] SEQ ID NO:1167: n indicates t or deletion (Position 21).

[0831] SEQ ID NO:1168: n indicates t or deletion (Position 21).

[0832] SEQ ID NO:1169: n indicates g (Position 21).

[0833] SEQ ID NO:1171 n indicates c (Position 21).

[0834] SEQ ID NO:1173: n indicates t (Position 21).

[0835] SEQ ID NO:1175: n indicates c or deletion (Position 21).

[0836] SEQ ID NO:1200: n indicates a or deletion (Position 21).

[0837] SEQ ID NO:1204: n indicates a (Position 21).

[0838] SEQ ID NO:1207: n indicates tt (Position 21).

[0839] SEQ ID NO:1210: n indicates at (Position 21).

[0840] SEQ ID NO:1245: n indicates t (Position 21).

[0841] SEQ ID NO:1248: n indicates t or deletion (Position 21).

[0842] SEQ ID NO:1249: n indicates t (Position 21).

[0843] SEQ ID NO:1251: n indicates a or deletion (Position 21).

[0844] SEQ ID NO:1252: n indicates tgt or deletion (Position 21).

[0845] SEQ ID NO:1260: n indicates t or deletion (Position 21).

[0846] SEQ ID NO:1309: n indicates a or deletion (Position 21).

[0847] SEQ ID NO:1389: n indicates g or deletion (Position 21).

[0848] SEQ ID NO:1411: n indicates a or deletion (Position 21).

[0849] SEQ ID NO:1417: n indicates aaag (Position 21).

[0850] SEQ ID NO:1424: n indicates gtg or deletion (Position 21).

[0851] SEQ ID NO:1426: n indicates gg or tggtggggtgga (Position 21).

[0852] SEQ ID NO:1429: n indicates at or deletion (Position 21).

[0853] SEQ ID NO:1436: n indicates a (Position 21).

[0854] SEQ ID NO:1453: n indicates c or deletion (Position 21).

[0855] SEQ ID NO:1456: n indicates gg (Position 21).

[0856] SEQ ID NO:1465: n indicates gtc or deletion (Position 21).

[0857] SEQ ID NO:1487: n indicates t or deletion (Position 21).

[0858] SEQ ID NO:1494: n indicates tt (Position 21).

[0859] SEQ ID NO:1497: n indicates t repeated 9 to 12 times (Position 21).

[0860] SEQ ID NO:1499: n indicates a or deletion (Position 21).

[0861] SEQ ID NO:1501: n indicates a repeated 10 to 13 times (Position 21).

[0862] SEQ ID NO:1504: n indicates ct or deletion (Position 21).

[0863] SEQ ID NO:1507: n indicates cagatcttcttcagctaatttagaaatgt (Position 21).

[0864] SEQ ID NO:1533: n indicates a or deletion (Position 21).

[0865] SEQ ID NO:1540: n indicates c (Position 21).

[0866] SEQ ID NO:1545: n indicates t (Position 21).

[0867] SEQ ID NO:1552: n indicates t repeated 9 to 12 times (Position 21).

[0868] SEQ ID NO:1555: n indicates t (Position 21).

[0869] SEQ ID NO:1557: n indicates aaaaaaagaaaa (Position 21).

[0870] SEQ ID NO:1558: n indicates aaaaaaaaaaaa (Position 21).

[0871] SEQ ID NO:1559: n indicates aaaaaaaaaa (Position 21).

[0872] SEQ ID NO:1563: n indicates t or deletion (Position 21).

[0873] SEQ ID NO:1572: n indicates c (Position 21).

[0874] SEQ ID NO:1574: n indicates a or deletion (Position 21).

[0875] SEQ ID NO:1575: n indicates c or deletion (Position 21).

[0876] SEQ ID NO:1596: n indicates cct or deletion (Position 21).

[0877] SEQ ID NO:1598: n indicates tc (Position 21).

[0878] SEQ ID NO:1616: n indicates ca or deletion (Position 21).

[0879] SEQ ID NO:1638: n indicates g (Position 21).

[0880] SEQ ID NO:1661: n indicates t or deletion (Position 21).

[0881] SEQ ID NO:1690: n indicates gccag (Position 21).

[0882] SEQ ID NO:1718: n indicates t (Position 21).

[0883] SEQ ID NO:1723: n indicates c or deletion (Position 21).

[0884] SEQ ID NO:1729: n indicates tc or deletion (Position 21).

[0885] SEQ ID NO:1740: n indicates ct or deletion (Position 21).

[0886] SEQ ID NO:1771: n indicates a (Position 21).

[0887] SEQ ID NO:1781: n indicates a or deletion (Position 21).

[0888] SEQ ID NO:1787: n indicates t or deletion (Position 21).

[0889] SEQ ID NO:1791: n indicates t or deletion (Position 21).

[0890] SEQ ID NO:1792: n indicates g or deletion (Position 21).

[0891] SEQ ID NO:1800: n indicates t or deletion (Position 21).

[0892] SEQ ID NO:1801: n indicates t or deletion (Position 21).

[0893] SEQ ID NO:1802: n indicates a or deletion (Position 21).

[0894] SEQ ID NO:1815: n indicates a or deletion (Position 21).

[0895] SEQ ID NO:1819: n indicates ca or deletion (Position 21).

[0896] SEQ ID NO:1820: n indicates t or deletion (Position 21).

[0897] SEQ ID NO:1824: n indicates t or deletion (Position 21).

[0898] SEQ ID NO:1829: n indicates t or deletion (Position 21).

[0899] SEQ ID NO:1830: n indicates c or deletion (Position 21).

[0900] SEQ ID NO:1838: n indicates a or deletion (Position 21).

[0901] SEQ ID NO:1840: n indicates t or deletion (Position 21).

[0902] SEQ ID NO:1847: n indicates gatt or deletion (Position 21).

[0903] SEQ ID NO:1848: n indicates t (Position 21).

[0904] SEQ ID NO:1853: n indicates t or deletion (Position 21).

[0905] SEQ ID NO:1854: n indicates gt (Position 21).

[0906] SEQ ID NO:1857: n indicates a or deletion (Position 21).

[0907] SEQ ID NO:1858: n indicates a or deletion (Position 21).

[0908] SEQ ID NO:1862: n indicates t or deletion (Position 21).

[0909] SEQ ID NO:1865: n indicates at or deletion (Position 21).

[0910] SEQ ID NO:1871: n indicates a or deletion (Position 21).

[0911] SEQ ID NO:1874: n indicates t or deletion (Position 21).

[0912] SEQ ID NO:1877: n indicates at or deletion (Position 21).

[0913] SEQ ID NO:1878: n indicates a or deletion (Position 21).

[0914] SEQ ID NO:1879: n indicates t repeated 12 to 14 times (Position 21).

[0915] SEQ ID NO:1882: n indicates t or deletion (Position 21).

[0916] SEQ ID NO:1884: n indicates cac or deletion (Position 21).

[0917] SEQ ID NO:1891: n indicates cca (Position 21).

[0918] SEQ ID NO:1919: n indicates t or deletion (Position 21).

[0919] SEQ ID NO:1949: n indicates c or deletion (Position 21).

[0920] SEQ ID NO:1957: n indicates aaaa or deletion (Position 21).

[0921] SEQ ID NO:1970: n indicates c or deletion (Position 21).

[0922] SEQ ID NO:1980: n indicates t repeated 7 to 9 times (Position 21).

[0923] SEQ ID NO:1981: n indicates a or deletion (Position 21).

[0924] SEQ ID NO:1993: n indicates taac or deletion (Position 21).

[0925] SEQ ID NO:1994: n indicates ctcttt (Position 21).

[0926] SEQ ID NO:1995: n indicates ct (Position 21).

[0927] SEQ ID NO:2002: n indicates a or deletion (Position 21).

[0928] SEQ ID NO:2005: n indicates t or deletion (Position 21).

[0929] SEQ ID NO:2008: n indicates g or deletion (Position 21).

[0930] SEQ ID NO:2011: n indicates aattagaa or deletion (Position 21).

[0931] SEQ ID NO:2012: n indicates tttaaaa or ttttaa (Position 21).

[0932] SEQ ID NO:2015: n indicates t or deletion (Position 21).

[0933] SEQ ID NO:2020: n indicates t or deletion (Position 21).

[0934] SEQ ID NO:2024: n indicates g or deletion (Position 21).

[0935] SEQ ID NO:2025: n indicates t or deletion (Position 21).

[0936] SEQ ID NO:2030: n indicates aaa or deletion (Position 21).

[0937] SEQ ID NO:2031: n indicates a or deletion (Position 21).

[0938] SEQ ID NO:2042: n indicates c (Position 21).

[0939] SEQ ID NO:2072: n indicates a or deletion (Position 21).

[0940] SEQ ID NO:2074: n indicates a or deletion (Position 21).

[0941] SEQ ID NO:2243: n indicates tca repeated 14 to 16 times (Position 21).

[0942] SEQ ID NO:2244: n indicates a repeated 8 to 10 times (Position 21).

[0943] SEQ ID NO:2245: n indicates cacagtcat or deletion (Position 21).

[0944] SEQ ID NO:2246: n indicates tt or deletion (Position 21).

[0945] SEQ ID NO:2247: n indicates a repeated 10 to 12 times (Position 21).

[0946] SEQ ID NO:2248: n indicates c or deletion (Position 21).

[0947] SEQ ID NO:2249: n indicates a repeated 16 to 18 times (Position 21).

[0948] SEQ ID NO:2250: n indicates g (Position 21).

[0949] SEQ ID NO:2252: n indicates c or deletion (Position 21).

[0950] SEQ ID NO:2253: n indicates t or deletion (Position 21).

[0951] SEQ ID NO:2254: n indicates a or deletion (Position 21).

[0952] SEQ ID NO:2255: n indicates tg (Position 21).

[0953] SEQ ID NO:2257: n indicates t repeated 10 to 13 (Position 21).

[0954] SEQ ID NO:2258: n indicates gt repeated 11 to 13 times (Position 21).

[0955] SEQ ID NO:2259: n indicates a or deletion (Position 21).

[0956] SEQ ID NO:2260: n indicates g or deletion (Position 21).

[0957] SEQ ID NO:2261: n indicates g or deletion (Position 21).

[0958] SEQ ID NO:2262: n indicates t repeated 9 to 11 times (Position 21).

[0959] SEQ ID NO:2263: n indicates g (Position 21).

[0960] SEQ ID NO:2265: n indicates tt or deletion (Position 21).

[0961] SEQ ID NO:2266: n indicates a repeated 7 to 9 times (Position 21).

[0962] SEQ ID NO:2267: n indicates t repeated 9 to 11 times (Position 21).

[0963] SEQ ID NO:2268: n indicates a repeated 9 to 10 times (Position 21).

[0964] SEQ ID NO:2269: n indicates gt or deletion (Position 21).

[0965] SEQ ID NO:2270: n indicates a or deletion (Position 21).

[0966] SEQ ID NO:2271: n indicates t (Position 21).

[0967] SEQ ID NO:2273: n indicates a or deletion (Position 21).

[0968] SEQ ID NO:2274: n indicates ct or deletion (Position 21).

[0969] SEQ ID NO:2275: n indicates g or deletion (Position 21).

[0970] SEQ ID NO:2276: n indicates a or deletion (Position 21).

[0971] SEQ ID NO:2277: n indicates a or deletion (Position 21).

[0972] SEQ ID NO:2278: n indicates a or deletion (Position 21).

[0973] SEQ ID NO:2279: n indicates c or deletion (Position 21).

[0974] SEQ ID NO:2280: n indicates aaag or deletion (Position 21).

[0975] SEQ ID NO:2348: n indicates t repeated 22 to 26 times (Position 21).

[0976] SEQ ID NO:2349: n indicates g repeated 8 to 10 times (Position 21).

[0977] SEQ ID NO:2350: n indicates c repeated 6 to 7 times (Position 21).

[0978] SEQ ID NO:2351: n indicates a repeated 12 to 14 times (Position 21).

[0979] SEQ ID NO:2427: n indicates caccaggcagcagactctgatgaggaggggagggg (Position 21).

[0980] SEQ ID NO:2429: n indicates g (Position 21).

[0981] SEQ ID NO:2474: n indicates tcac or deletion (Position 21).

[0982] SEQ ID NO:2475: n indicates t or deletion (Position 21).

[0983] SEQ ID NO:2476: n indicates t repeated 9 to 11 times (Position 21).

[0984] SEQ ID NO:2477: n indicates a repeated 7 to 8 times (Position 21).

[0985] SEQ ID NO:2495: n indicates t repeated 13 to 16 times (Position 21).

[0986] SEQ ID NO:2496: n indicates t repeated 9 to 10 times (Position 21).

[0987] SEQ ID NO:2497: n indicates t repeated 14 to 16 times (Position 21).

[0988] SEQ ID NO:2498: n indicates t repeated 13 to 17 times (Position 21).

[0989] SEQ ID NO:2499: n indicates t (Position 21).

[0990] SEQ ID NO:2501: n indicates a repeated 8 to 9 times (Position 21).

[0991] SEQ ID NO:2502: n indicates t repeated 8 to 9 times (Position 21).

[0992] SEQ ID NO:2503: n indicates gcagtattactgtagt or deletion (Position 21).

[0993] SEQ ID NO:2504: n indicates t repeated 13 to 14 times (Position 21).

[0994] SEQ ID NO:2505: n indicates t repeated 9 to 10 times (Position 21).

[0995] SEQ ID NO:2506: n indicates t repeated 10 to 11 times (Position 21).

[0996] SEQ ID NO:2524: n indicates t or deletion (Position 21).

[0997] SEQ ID NO:2525: n indicates t repeated 12 to 15 times (Position 21).

[0998] SEQ ID NO:2586: n indicates a or deletion (Position 21).

[0999] SEQ ID NO:2587: n indicates at or deletion (Position 21).

[1000] SEQ ID NO:2594: n indicates t or deletion (Position 21).

[1001] SEQ ID NO:2595: n indicates ttc or deletion (Position 21).

[1002] SEQ ID NO:2606: n indicates ctt (Position 21).

[1003] SEQ ID NO:2651: n indicates c repeated 9 to 11 times (Position 21).

[1004] SEQ ID NO:2652: n indicates a repeated 15 to 21 times (Position 21).

[1005] SEQ ID NO:2653: n indicates ggggtggcggggtggg or deletion (Position 21).

[1006] SEQ ID NO:2654: n indicates t or deletion (Position 21).

[1007] SEQ ID NO:2655: n indicates a (Position 21).

[1008] SEQ ID NO:2657: n indicates a or deletion (Position 21).

[1009] SEQ ID NO:2658: n indicates t repeated 10 to 12 times (Position 21).

[1010] SEQ ID NO:2659: n indicates tt (Position 21).

[1011] SEQ ID NO:2661: n indicates tccctccttgaagctgatcgt or deletion (Position 21).

[1012] SEQ ID NO:2662: n indicates ca repeated 12 to 18 times (Position 21).

[1013] SEQ ID NO:2685: n indicates a repeated 18 to 20 times (Position 21).

[1014] SEQ ID NO:2686: n indicates aa (Position 21).

[1015] SEQ ID NO:2688: n indicates t or deletion (Position 21).

[1016] SEQ ID NO:2689: n indicates t repeated 9 to 13 times (Position 21).

[1017] SEQ ID NO:2690: n indicates aa or deletion (Position 21).

[1018] SEQ ID NO:2691: n indicates ttgaca or gtccaatat (Position 21).

[1019] SEQ ID NO:2692: n indicates cta or deletion (Position 21).

[1020] SEQ ID NO:2693: n indicates t repeated 9 to 10 times (Position 21).

[1021] SEQ ID NO:2694: n indicates gagatgttgtggctcacat (Position 21).

[1022] SEQ ID NO:2696: n indicates cc or deletion (Position 21).

[1023] SEQ ID NO:2697: n indicates act or deletion (Position 21).

[1024] SEQ ID NO:2755: n indicates tat or deletion (Position 21).

[1025] SEQ ID NO:2756: n indicates ac repeated 14 to 17 times (Position 21).

[1026] SEQ ID NO:2757: n indicates a repeated 16 to 27 times (Position 21).

[1027] SEQ ID NO:2758: n indicates t or deletion (Position 21).

[1028] SEQ ID NO:2759: n indicates a repeated 8 to 10 times (Position 21).

[1029] SEQ ID NO:2760: n indicates gt repeated 9 to 11 times (Position 21).

[1030] SEQ ID NO:2761: n indicates aa or deletion (Position 21).

[1031] SEQ ID NO:2762: n indicates t or deletion (Position 21).

[1032] SEQ ID NO:2763: n indicates ac repeated 8 to 12 times (Position 21).

[1033] SEQ ID NO:2764: n indicates a or deletion (Position 21).

[1034] SEQ ID NO:2810: n indicates a (Position 21).

[1035] SEQ ID NO:2812: n indicates aa or deletion (Position 21).

[1036] SEQ ID NO:2813: n indicates ca or deletion (Position 21).

[1037] SEQ ID NO:2814: n indicates t or deletion (Position 21).

[1038] SEQ ID NO:2815: n indicates tgtgtg or deletion (Position 21).

[1039] SEQ ID NO:2912: n indicates a (Position 21).

[1040] SEQ ID NO:2914: n indicates g (Position 21).

[1041] SEQ ID NO:2916: n indicates actt or deletion (Position 21).

[1042] SEQ ID NO:2917: n indicates ttta or deletion (Position 21).

[1043] SEQ ID NO:2918: n indicates a repeated 11 to 13 times (Position 21).

[1044] SEQ ID NO:2919: n indicates t repeated 8 to 10 times (Position 21).

[1045] SEQ ID NO:2920: n indicates a repeated 12 to 14 times (Position 21).

[1046] SEQ ID NO:2921: n indicates cttgta or deletion (Position 21).

[1047] SEQ ID NO:2922: n indicates a repeated 9 to 10 times (Position 21).

[1048] SEQ ID NO:2923: n indicates c or deletion (Position 21).

[1049] SEQ ID NO:2924: n indicates ctt (Position 21).

[1050] SEQ ID NO:2926: n indicates a or deletion (Position 21).

[1051] SEQ ID NO:2927: n indicates a repeated 9 to 10 times (Position 21).

[1052] SEQ ID NO:2928: n indicates tgt or deletion (Position 21).

[1053] SEQ ID NO:2929: n indicates a repeated 24 to 27 times (Position 21).

[1054] SEQ ID NO:2930: n indicates ta repeated 10 to 21 times (Position 21).

[1055] SEQ ID NO:2931: n indicates a repeated 8 to 10 times (Position 21).

[1056] SEQ ID NO:2932: n indicates a repeated 11 to 13 times (Position 21).

[1057] SEQ ID NO:2933: n indicates a repeated 8 to 10 times (Position 21).

[1058] SEQ ID NO:2999: n indicates tatc or deletion (Position 21).

[1059] SEQ ID NO:3000: n indicates atattcacttggtatctg or deletion (Position 21).

[1060] SEQ ID NO:3001: n indicates tt ta or deletion (Position 21).

[1061] SEQ ID NO:3002: n indicates t (Position 21).

[1062] SEQ ID NO:3004: n indicates g or deletion (Position 21).

[1063] SEQ ID NO:3005: n indicates a or deletion (Position 21).

[1064] SEQ ID NO:3006: n indicates a repeated 9 to 11 times (Position 21).

[1065] SEQ ID NO:3007: n indicates g or deletion (Position 21).

[1066] SEQ ID NO:3008: n indicates at repeated 4 to 5 times (Position 21).

[1067] SEQ ID NO:3009: n indicates t repeated 7 to 8 times (Position 21).

[1068] SEQ ID NO:3010: n indicates t repeated 19 to 23 times (Position 21).

[1069] SEQ ID NO:3011: n indicates t or deletion (Position 21).

[1070] SEQ ID NO:3012: n indicates tgat or deletion (Position 21).

[1071] SEQ ID NO:3013: n indicates t repeated 8 to 10 times (Position 21).

[1072] SEQ ID NO:3014: n indicates a or deletion (Position 21).

[1073] SEQ ID NO:3021: n indicates a repeated 13 to 15 times (Position 21).

[1074] SEQ ID NO:3022: n indicates t repeated 12 to 15 times (Position 21).

[1075] SEQ ID NO:3042: n indicates g (Position 21).

[1076] SEQ ID NO:3044: n indicates a or deletion (Position 21).

[1077] SEQ ID NO:3046: n indicates g or deletion (Position 21).

[1078] SEQ ID NO:3047: n indicates t repeated 11 to 13 times (Position 21).

[1079] SEQ ID NO:3049: n indicates a or deletion (Position 21).

[1080] SEQ ID NO:3051: n indicates t repeated 9 to 11 times (Position 21).

[1081] SEQ ID NO:3054: n indicates t or deletion (Position 21).

[1082] SEQ ID NO:3056: n indicates t or deletion (Position 21).

[1083] SEQ ID NO:3060: n indicates t or deletion (Position 21).

[1084] SEQ ID NO:3065: n indicates aaga (Position 21).

[1085] SEQ ID NO:3069: n indicates aaaa or deletion (Position 21).

[1086] SEQ ID NO:3073: n indicates t repeated 9 to 13 times (Position 21).

[1087] SEQ ID NO:3081: n indicates a or deletion (Position 21).

[1088] SEQ ID NO:3103: n indicates t repeated 11 to 13 times (Position 21).

[1089] SEQ ID NO:3119: n indicates acta (Position 21).

[1090] SEQ ID NO:3125: n indicates gtg or deletion (Position 21).

[1091] SEQ ID NO:3130: n indicates t repeated 11 to 12 times (Position 21).

[1092] SEQ ID NO:3140: n indicates tta or deletion (Position 21).

[1093] SEQ ID NO:3154: n indicates g (Position 21).

[1094] SEQ ID NO:3156: n indicates a (Position 21).

[1095] SEQ ID NO:3158: n indicates cct or deletion (Position 21).

[1096] SEQ ID NO:3169: n indicates gga or deletion (Position 21).

[1097] SEQ ID NO:3179: n indicates t repeated 12 to 14 times (Position 21).

[1098] SEQ ID NO:3184: n indicates t repeated 16 to 17 times (Position 21).

[1099] SEQ ID NO:3196: n indicates g (Position 21).

[1100] SEQ ID NO:3273: n indicates ag (Position 21).

[1101] SEQ ID NO:3306: n indicates g (Position 21).

[1102] SEQ ID NO:3310: n indicates c (Position 21).

[1103] SEQ ID NO:3315: n indicates ct or deletion (Position 21).

[1104] SEQ ID NO:3317: n indicates gc or deletion (Position 21).

[1105] SEQ ID NO:3352: n indicates t repeated 9 to 11 times (Position 21).

[1106] SEQ ID NO:3355: n indicates a (Position 21).

[1107] SEQ ID NO:3358: n indicates t or deletion (Position 21).

[1108] SEQ ID NO:3510 [symbol] n represents at or deletion (Location 21).

[1109] SEQ ID NO:3512 [symbol] n represents c or deletion (Location 21).

[1110] SEQ ID NO:3513 [symbol] n represents t or deletion (Location 21).

[1111] SEQ ID NO:3514 [symbol] n represents t or deletion (Location 21).

[1112] SEQ ID NO:3515 [symbol] n represents g or deletion (Location 21).

[1113] SEQ ID NO:3517 [symbol] n represents c or deletion (Location 21).

[1114] SEQ ID NO:3519 [symbol] n represents t or deletion (Location 21).

[1115] SEQ ID NO:3521 [symbol] n represents c or deletion (Location 21).

[1116] SEQ ID NO:3649 [symbol] n represents 14 to 16 repeats of tca (from Location 21).

[1117] SEQ ID NO:3650 [symbol] n represents 8 to 10 repeats of a (from Location 21).

[1118] SEQ ID NO:3651 [symbol] n represents cacagtcat or deletion (Location 21).

[1119] SEQ ID NO3652 [symbol] n represents tt or deletion (Location 21).

[1120] SEQ ID NO:3653 [symbol] n represents 10 to 12 repeats of a (from Location 21).

[1121] SEQ ID NO:3654 [symbol] n represents c or deletion (Location 21).

[1122] SEQ ID NO:3655 [symbol] n represents 16 to 18 repeats of a (from Location 21).

[1123] SEQ ID NO:3656 [symbol] n represents g or deletion (Location 21).

[1124] SEQ ID NO:3658 [symbol] n represents c or deletion (Location 21).

[1125] SEQ ID NO:3659 [symbol] n represents t or deletion (Location 21).

[1126] SEQ ID NO:3660 [symbol] n represents a or deletion (Location 21).

[1127] SEQ ID NO:3661 [symbol] n represents tg or deletion (Location 21).

[1128] SEQ ID NO:3663 [symbol] n represents 10 to 13 repeats of t (from Location 21).

[1129] SEQ ID NO:3664 [symbol] n represents 11 to 13 repeats of gt (from Location 21).

[1130] SEQ ID NO:3665 [symbol] n represents a or deletion (Location 21).

[1131] SEQ ID NO:3666 [symbol] n represents g or deletion (Location 21).

[1132] SEQ ID NO:3667 [symbol] n represents g or deletion (Location 21).

[1133] SEQ ID NO:3668 [symbol] n represents 9 to 11 repeats of t (from Location 21).

[1134] SEQ ID NO:3669 [symbol] n represents g or deletion (Location 21).

[1135] SEQ ID NO:3671 [symbol] n represents tt or deletion (Location 21).

[1136] SEQ ID NO:3672 [symbol] n represents 7 to 9 repeats of a (from Location 21).

[1137] SEQ ID NO:3673 [symbol] n represents 9 to 11 repeats of t (from Location 21).

[1138] SEQ ID NO:3674 [symbol] n represents 9 to 10 repeats of a (from Location 21).

[1139] SEQ ID NO:3675 [symbol] n represents gt or deletion (Location 21).

[1140] SEQ ID NO:3676 [symbol] n represents a or deletion (Location 21).

[1141] SEQ ID NO:3677 [symbol] n represents t or deletion (Location 21).

[1142] SEQ ID NO:3679 [symbol] n represents a or deletion (Location 21).

[1143] SEQ ID NO:3680 [symbol] n represents ct or deletion (Location 21).

[1144] SEQ ID NO:3681 [symbol] n represents g or deletion (Location 21).

[1145] SEQ ID NO:3682 [symbol] n represents a or deletion (Location 21).

[1146] SEQ ID NO:3683 [symbol] n represents a or deletion (Location 21).

[1147] SEQ ID NO:3684 [symbol] n represents a or deletion (Location 21).

[1148] SEQ ID NO:3685 [symbol] n represents c or deletion (Location 21).

[1149] SEQ ID NO:3686 [symbol] n represents aaag or deletion (Location 21).

[1150] SEQ ID NO:3751 [symbol] n represents 22 to 26 repeats of t (from Location 21).

[1151] SEQ ID NO:3752 [symbol] n represents 8 to 10 repeats of g (from Location 21).

[1152] SEQ ID NO:3753 [symbol] n represents 6 to 7 repeats of c (from Location 21).

[1153] SEQ ID NO:3754 [symbol] n represents 12 to 14 repeats of a (from Location 21).

[1154] SEQ ID NO:3833 [symbol] n represents tt or deletion (Location 21).

[1155] SEQ ID NO:3834 [symbol] n represents 9 to 11 repeats of a (from Location 21).

[1156] SEQ ID NO:3835 [symbol] n represents 8 to 12 repeats of a (from Location 21).

[1157] SEQ ID NO:3836 [symbol] n represents t or deletion (Location 21).

[1158] SEQ ID NO:3837 [symbol] n represents t or deletion (Location 21).

[1159] SEQ ID NO:3838 [symbol] n represents t or deletion (Location 21).

[1160] SEQ ID NO:3839 [symbol] n represents a or deletion (Location 21).

[1161] SEQ ID NO:3840 [symbol] n represents t or deletion (Location 21).

[1162] SEQ ID NO:3841 [symbol] n represents t or deletion (Location 21).

[1163] SEQ ID NO:3842 [symbol] n represents 11 to 15 repeats of t (from Location 21).

[1164] SEQ ID NO:3843 [symbol] n represents cat or deletion (Location 21).

[1165] SEQ ID NO:3844 [symbol] n represents t or deletion (Location 21).

[1166] SEQ ID NO:3845 [symbol] n represents a or deletion (Location 21).

[1167] SEQ ID NO:3846 [symbol] n represents a or deletion (Location 21).

[1168] SEQ ID NO:3847 [symbol] n represents t or deletion (Location 21).

[1169] SEQ ID NO:3848 [symbol] n represents a or deletion (Location 21).

[1170] SEQ ID NO:3857 [symbol] n represents g or deletion (Location 21).

[1171] SEQ ID NO:3879 [symbol] n represents a or deletion (Location 21).

[1172] SEQ ID NO:3885 [symbol] n represents aaag or deletion (Location 21).

[1173] SEQ ID NO:3915 [symbol] n represents t or deletion (Location 21).

[1174] SEQ ID NO:3918 [symbol] n represents a or deletion (Location 21).

[1175] SEQ ID NO:3926 [symbol] n represents at or deletion (Location 21).

[1176] SEQ ID NO:3933 [symbol] n represents a or deletion (Location 21).

[1177] SEQ ID NO:3950 [symbol] n represents c or deletion (Location 21).

[1178] SEQ ID NO:3953 [symbol] n represents gg or deletion (Location 21).

[1179] SEQ ID NO:3962 [symbol] n represents gtc or deletion (Location 21).

[1180] SEQ ID NO:3984 [symbol] n represents t or deletion (Location 21).

[1181] SEQ ID NO:3991 [symbol] n represents tt or deletion (Location 21).

[1182] SEQ ID NO:3994 [symbol] n represents 9 to 12 repeats of t (from Location 21).

[1183] SEQ ID NO:3996 [symbol] n represents a or deletion (Location 21).

[1184] SEQ ID NO:3998 [symbol] n represents 10 to 13 repeats of a (from Location 21).

[1185] SEQ ID NO:4001 [symbol] n represents ct or deletion (Location 21).

[1186] SEQ ID NO:4004 [symbol] n represents cagatcttcttcagctaatttagaaatgt or deletion (Location 21).

[1187] SEQ ID NO:4030 [symbol] n represents a or deletion (Location 21).

[1188] SEQ ID NO:4037 [symbol] n represents c or deletion (Location 21).

[1189] SEQ ID NO:4042 [symbol] n represents t or deletion (Location 21).

[1190] SEQ ID NO:4049 [symbol] n represents 9 to 12 repeats of t (from Location 21).

[1191] SEQ ID NO:4052 [symbol] n represents t or deletion (Location 21).

[1192] SEQ ID NO:4054 [symbol] n represents g (a)4, a (a)4 or a (Location 21).

[1193] SEQ ID NO:4058 [symbol] n represents t or deletion (Location 21).

[1194] SEQ ID NO:4067 [symbol] n represents c or deletion (Location 21).

[1195] SEQ ID NO:4069 [symbol] n represents a or deletion (Location 21).

[1196] SEQ ID NO:4070 [symbol] n represents c or deletion (Location 21).

[1197] SEQ ID NO:4077 [symbol] n represents g or deletion (Location 21).

[1198] SEQ ID NO:4079 [symbol] n represents 18 to 20 repeats of t (from Location 21).

[1199] SEQ ID NO:4084 [symbol] n represents 11 to 13 repeats of a (from Location 21).

[1200] SEQ ID NO:4085 [symbol] n represents gaaa or deletion (Location 21).

[1201] SEQ ID NO:4089 [symbol] n represents 10 to 12 repeats of a (from Location 21).

[1202] SEQ ID NO:4092 [symbol] n represents c or deletion (Location 21).

[1203] SEQ ID NO:4102 [symbol] n represents ca or deletion (Location 21).

[1204] SEQ ID NO:4109 [symbol] n represents at or deletion (Location 21).

[1205] SEQ ID NO:4113 [symbol] n represents ctt or deletion (Location 21).

[1206] SEQ ID NO:4115 [symbol] n represents g or deletion (Location 21).

[1207] SEQ ID NO:4117 [symbol] n represents ggggct or deletion (Location 21).

[1208] SEQ ID NO:4121 [symbol] n represents 19 to 22 repeats of t (from Location 21).

[1209] SEQ ID NO:4126 [symbol] n represents 6 to 7 repeats of t (from Location 21).

[1210] SEQ ID NO:4129 [symbol] n represents 11 to 13 repeats of t (from Location 21).

[1211] SEQ ID NO:4173 [symbol] n represents 7 to 8 repeats of c (from Location 21).

[1212] SEQ ID NO:4175 [symbol] n represents 10 to 12 repeats of a (from Location 21).

[1213] SEQ ID NO:4183 [symbol] n represents c or deletion (Location 21).

[1214] SEQ ID NO:4188 [symbol] n represents aaga or deletion (Location 21).

[1215] SEQ ID NO:4190 [symbol] n represents 9 to 11 repeats of a (from Location 21).

[1216] SEQ ID NO:4193 [symbol] n represents ct or deletion (Location 21).

[1217] SEQ ID NO:4198 [symbol] n represents 8 to 9 repeats of t (from Location 21).

[1218] SEQ ID NO:4218 [symbol] n represents g or deletion (Location 21).

[1219] SEQ ID NO:4224 [symbol] n represents cttt or deletion (Location 21).

[1220] SEQ ID NO:4229 [symbol] n represents t or deletion (Location 21).

[1221] SEQ ID NO:4234 [symbol] n represents c or deletion (Location 21).

[1222] SEQ ID NO:4235 [symbol] n represents a or deletion (Location 21).

[1223] SEQ ID NO:4238 [symbol] n represents gtt or deletion (Location 21).

[1224] SEQ ID NO:4239 [symbol] n represents t or deletion (Location 21).

[1225] SEQ ID NO:4259 [symbol] n represents at or deletion (Location 21).

[1226] SEQ ID NO:4273 [symbol] n represents g or deletion (Location 21).

[1227] SEQ ID NO:4280 [symbol] n represents 15 to 17 repeats of a (from Location 21).

[1228] SEQ ID NO:4294 [symbol] n represents t or deletion (Location 21).

[1229] SEQ ID NO:4298 [symbol] n represents t or deletion (Location 21).

[1230] SEQ ID NO:4310 [symbol] n represents t or deletion (Location 21).

[1231] SEQ ID NO:4314 [symbol] n represents a or deletion (Location 21).

[1232] SEQ ID NO:4315 [symbol] n represents 13 to 15 repeats of t (from Location 21).

[1233] SEQ ID NO:4316 [symbol] n represents 12 to 13 repeats of a (from Location 21).

[1234] SEQ ID NO:4317 [symbol] n represents t or deletion (Location 21).

[1235] SEQ ID NO:4319 [symbol] n represents t or deletion (Location 21).

[1236] SEQ ID NO:4320 [symbol] n represents 13 to 15 repeats of a (from Location 21).

[1237] SEQ ID NO:4325 [symbol] n represents a or deletion (Location 21).

[1238] SEQ ID NO:4331 [symbol] n represents 5 to 11 repeats of t (from Location 21).

[1239] SEQ ID NO:4333 [symbol] n represents 8 to 9 repeats of t (from Location 21).

[1240] SEQ ID NO:4334 [symbol] n represents t or deletion (Location 21).

[1241] SEQ ID NO:4345 [symbol] n represents 9 to 10 repeats of t (from Location 21).

[1242] SEQ ID NO:4348 [symbol] n represents 10 to 11 repeats of a (from Location 21).

[1243] SEQ ID NO:4354 [symbol] n represents a or deletion (Location 21).

[1244] SEQ ID NO:4361 [symbol] n represents a or deletion (Location 21).

[1245] SEQ ID NO:4372 [symbol] n represents ct or deletion (Location 21).

[1246] SEQ ID NO:4391 [symbol] n represents t or deletion (Location 21).

[1247] SEQ ID NO:4397 [symbol] n represents a or deletion (Location 21).

[1248] SEQ ID NO:4398 [symbol] n represents at or deletion (Location 21).

[1249] SEQ ID NO:4408 [symbol] n represents tgtccaaaggaaggacacg or deletion (Location 21).

[1250] SEQ ID NO:4414 [symbol] n represents 6 to 8 repeats of tc (from Location 21).

[1251] SEQ ID NO:4416 [symbol] n represents c or deletion (Location 21).

[1252] SEQ ID NO:4419 [symbol] n represents t or deletion (Location 21).

[1253] SEQ ID NO:4424 [symbol] n represents t or deletion (Location 21).

[1254] SEQ ID NO:4425 [symbol] n represents c or deletion (Location 21).

[1255] SEQ ID NO:4433 [symbol] n represents a or deletion (Location 21).

[1256] SEQ ID NO:4435 [symbol] n represents t or deletion (Location 21).

[1257] SEQ ID NO:4442 [symbol] n represents 6 to 7 repeats of gatt (from Location 21).

[1258] SEQ ID NO:4443 [symbol] n represents t or deletion (Location 21).

[1259] SEQ ID NO:4448 [symbol] n represents t or deletion (Location 21).

[1260] SEQ ID NO:4449 [symbol] n represents gt or deletion (Location 21).

[1261] SEQ ID NO:4452 [symbol] n represents a or deletion (Location 21).

[1262] SEQ ID NO:4453 [symbol] n represents a or deletion (Location 21).

[1263] SEQ ID NO:4457 [symbol] n represents t or deletion (Location 21).

[1264] SEQ ID NO:4460 [symbol] n represents at or deletion (Location 21).

[1265] SEQ ID NO:4466 [symbol] n represents a or deletion (Location 21).

[1266] SEQ ID NO:4469 [symbol] n represents t or deletion (Location 21).

[1267] SEQ ID NO:4472 [symbol] n represents at or deletion (Location 21).

[1268] SEQ ID NO:4473 [symbol] n represents a or deletion (Location 21).

[1269] SEQ ID NO:4474 [symbol] n represents 12 to 14 repeats of t (from Location 21).

[1270] SEQ ID NO:4477 [symbol] n represents t or deletion (Location 21).

[1271] SEQ ID NO:4479 [symbol] n represents cac or deletion (Location 21).

[1272] SEQ ID NO:4486 [symbol] n represents cca or deletion (Location 21).

[1273] SEQ ID NO:4514 [symbol] n represents t or deletion (Location 21).

[1274] SEQ ID NO:4544 [symbol] n represents c or deletion (Location 21).

[1275] SEQ ID NO:4552 [symbol] n represents aaaa or deletion (Location 21).

[1276] SEQ ID NO:4565 [symbol] n represents c or deletion (Location 21).

[1277] SEQ ID NO:4575 [symbol] n represents 8 to 9 repeats of t (from Location 21).

[1278] SEQ ID NO:4576 [symbol] n represents a or deletion (Location 21).

[1279] SEQ ID NO:4588 [symbol] n represents taac or deletion (Location 21).

[1280] SEQ ID NO:4589 [symbol] n represents ctcttt or deletion (Location 21).

[1281] SEQ ID NO:4590 [symbol] n represents ct or deletion (Location 21).

[1282] SEQ ID NO:4597 [symbol] n represents a or deletion (Location 21).

[1283] SEQ ID NO:4600 [symbol] n represents t or deletion (Location 21).

[1284] SEQ ID NO:4603 [symbol] n represents g or deletion (Location 21).

[1285] SEQ ID NO:4606 [symbol] n represents aattagaa or deletion (Location 21).

[1286] SEQ ID NO:4607 [symbol] n represents tttaaaa or ttttaa (Location 21).

[1287] SEQ ID NO:4610 [symbol] n represents t or deletion (Location 21).

[1288] SEQ ID NO:4615 [symbol] n represents t or deletion (Location 21).

[1289] SEQ ID NO:4627 [symbol] n represents c or deletion (Location 21).

[1290] SEQ ID NO:4652 [symbol] n represents 11 to 14 repeats of t (from Location 21).

[1291] SEQ ID NO:4653 [symbol] n represents t or deletion (Location 21).

[1292] SEQ ID NO:4654 [symbol] n represents 10 to 13 repeats of t (from Location 21).

[1293] SEQ ID NO:4655 [symbol] n represents t or deletion (Location 21).

[1294] SEQ ID NO:4657 [symbol] n represents t or deletion (Location 21).

[1295] SEQ ID NO:4658 [symbol] n represents ta or deletion (Location 21).

[1296] SEQ ID NO:4660 [symbol] n represents 13 to 15 repeats of t (from Location 21).

[1297] SEQ ID NO:4661 [symbol] n represents c or deletion (Location 21).

[1298] SEQ ID NO:4662 [symbol] n represents 17 to 20 repeats of a (from Location 21).

[1299] SEQ ID NO:4663 [symbol] n represents 13 to 13 repeats of t (from Location 21).

[1300] SEQ ID NO:4664 [symbol] n represents 8 to 9 repeats of t (from Location 21).

[1301] SEQ ID NO:4665 [symbol] n represents 10 to 11 repeats of a (from Location 21).

[1302] SEQ ID NO:4666 [symbol] n represents 16 to 19 repeats of a (from Location 21).

[1303] SEQ ID NO:4758 [symbol] n represents g or deletion (Location 21).

[1304] SEQ ID NO:4760 [symbol] n represents 6 to 7 repeats of a (from Location 21).

[1305] SEQ ID NO:4761 [symbol] n represents c or deletion (Location 21).

[1306] SEQ ID NO:4763 [symbol] n represents tcctcaggg or deletion (Location 21).

[1307] SEQ ID NO:4764 [symbol] n represents 8 to 10 repeats of cgc (from Location 21).

[1308] SEQ ID NO:4765 [symbol] n represents 10 to 12 repeats of a (from Location 21).

[1309] SEQ ID NO:4766 [symbol] n represents caccaggcagcagactctgatgaggaggggaggggg or deletion (Location 21).

[1310] SEQ ID NO:4768 [symbol] n represents g or deletion (Location 21).

[1311] SEQ ID NO:4808 [symbol] n represents tcac or deletion (Location 21).

[1312] SEQ ID NO:4809 [symbol] n represents t or deletion (Location 21).

[1313] SEQ ID NO:4810 [symbol] n represents 9 to 11 repeats of t (from Location 21).

[1314] SEQ ID NO:4811 [symbol] n represents 7 to 8 repeats of a (from Location 21).

[1315] SEQ ID NO:4847 [symbol] n represents agg or deletion (Location 21).

[1316] SEQ ID NO:4848 [symbol] n represents taacatt or deletion (Location 21).

[1317] SEQ ID NO:4849 [symbol] n represents 10 to 12 repeats of a (from Location 21).

[1318] SEQ ID NO:4850 [symbol] n represents 15 to 17 repeats of t (from Location 21).

[1319] SEQ ID NO:4851 [symbol] n represents 11 to 13 repeats of a (from Location 21).

[1320] SEQ ID NO:4877 [symbol] n represents 11 to 13 repeats of t (from Location 21).

[1321] SEQ ID NO:4878 [symbol] n represents t or deletion (Location 21).

[1322] SEQ ID NO:4879 [symbol] n represents t or deletion (Location 21).

[1323] SEQ ID NO:4880 [symbol] n represents 10 to 12 repeats of a (from Location 21).

[1324] SEQ ID NO:4881 [symbol] n represents t or deletion (Location 21)

[1325] SEQ ID NO:4883 [symbol] n represents 7 to 9 repeats of c (from Location 21).

[1326] SEQ ID NO:4884 [symbol] n represents a or deletion (Location 21)

[1327] SEQ ID NO:4891 [symbol] n represents 13 to 16 repeats of t (from Location 21).

[1328] SEQ ID NO:4892 [symbol] n represents 9 to 10 repeats of t (from Location 21).

[1329] SEQ ID NO:4893 [symbol] n represents 14 to 16 repeats of t (from Location 21).

[1330] SEQ ID NO:4894 [symbol] n represents 13 to 17 repeats of t (from Location 21).

[1331] SEQ ID NO:4895 [symbol] n represents t or deletion (Location 21).

[1332] SEQ ID NO:4897 [symbol] n represents 8 to 9 repeats of a (from Location 21).

[1333] SEQ ID NO:4898 [symbol] n represents 8 to 9 repeats of t (from Location 21).

[1334] SEQ ID NO:4899 [symbol] n represents gcagtattactgtagt or deletion (Location 21).

[1335] SEQ ID NO:4900 [symbol] n represents 13 to 14 repeats of t (from Location 21).

[1336] SEQ ID NO:4901 [symbol] n represents 9 to 10 repeats of t (from Location 21).

[1337] SEQ ID NO:4902 [symbol] n represents 10 to 11 repeats of t (from Location 21).

[1338] SEQ ID NO:4907 [symbol] n represents 10 to 14 repeats of a (from Location 21).

[1339] SEQ ID NO:4908 [symbol] n represents 13 to 15 repeats of a (from Location 21).

[1340] SEQ ID NO:4909 [symbol] n represents a or deletion (Location 21).

[1341] SEQ ID NO:4910 [symbol] n represents t or deletion (Location 21).

[1342] SEQ ID NO:4918 [symbol] n represents 13 to 15 repeats of a (from Location 21).

[1343] SEQ ID NO:4919 [symbol] n represents 12 to 15 repeats of a (from Location 21).

[1344] SEQ ID NO:4936 [symbol] n represents g or deletion (Location 21).

[1345] SEQ ID NO:4938 [symbol] n represents aa or deletion (Location 21).

[1346] SEQ ID NO:4983 [symbol] n represents a or deletion (Location 21).

[1347] SEQ ID NO:4985 [symbol] n represents aa or deletion (Location 21).

[1348] SEQ ID NO:4986 [symbol] n represents ca or deletion (Location 21).

[1349] SEQ ID NO:4987 [symbol] n represents t or deletion (Location 21).

[1350] SEQ ID NO:4988 [symbol] n represents tgtgtg or deletion (Location 21).

[1351] SEQ ID NO:5076 [symbol] n represents a or deletion (Location 21).

[1352] SEQ ID NO:5078 [symbol] n represents g or deletion (Location 21).

[1353] SEQ ID NO:5080 [symbol] n represents actt or deletion (Location 21).

[1354] SEQ ID NO:5081 [symbol] n represents ttta or deletion (Location 21).

[1355] SEQ ID NO:5082 [symbol] n represents 11 to 13 repeats of a (from Location 21).

[1356] SEQ ID NO:5083 [symbol] n represents 8 to 10 repeats of t (from Location 21).

[1357] SEQ ID NO:5084 [symbol] n represents 12 to 14 repeats of a (from Location 21).

[1358] SEQ ID NO:5085 [symbol] n represents cttgta or deletion (Location 21).

[1359] SEQ ID NO:5086 [symbol] n represents 9 to 10 repeats of a (from Location 21).

[1360] SEQ ID NO:5087 [symbol] n represents ctt or deletion (Location 21).

[1361] SEQ ID NO:5088 [symbol] n represents ctt or deletion (Location 21).

[1362] SEQ ID NO:5090 [symbol] n represents a or deletion (Location 21).

[1363] SEQ ID NO:5091 [symbol] n represents 9 to 11 repeats of a (from Location 21)

[1364] SEQ ID NO:5092 [symbol] n represents tgt or deletion (Location 21).

[1365] SEQ ID NO:5093 [symbol] n represents 24 to 27 repeats of a (from Location 21)

[1366] SEQ ID NO:5094 [symbol] n represents 10 to 21 repeats of ta (from Location 21)

[1367] SEQ ID NO:5095 [symbol] n represents 8 to 10 repeats of a (from Location 21)

[1368] SEQ ID NO:5096 [symbol] n represents 11 to 13 repeats of a (from Location 21)

[1369] SEQ ID NO:5097 [symbol] n represents 8 to 10 repeats of a (from Location 21)

[1370] SEQ ID NO:5155 [symbol] n represents ctat or deletion (Location 21).

[1371] SEQ ID NO:5156 [symbol] n represents atattcacttggtatctg or deletion (Location 21).

[1372] SEQ ID NO:5157 [symbol] n represents ttta or deletion (Location 21).

[1373] SEQ ID NO:5158 [symbol] n represents t or deletion (Location 21).

[1374] SEQ ID NO:5160 [symbol] n represents g or deletion (Location 21).

[1375] SEQ ID NO:5161 [symbol] n represents a or deletion (Location 21).

[1376] SEQ ID NO:5162 [symbol] n represents 9 to 11 repeats of a (from Location 21).

[1377] SEQ ID NO:5163 [symbol] n represents g or deletion (Location 21).

[1378] SEQ ID NO:5164 [symbol] n represents 4 to 5 repeats of at (from Location 21).

[1379] SEQ ID NO:5165 [symbol] n represents 7 to 8 repeats of t (from Location 21).

[1380] SEQ ID NO:5166 [symbol] n represents 19 to 23 repeats of t (from Location 21).

[1381] SEQ ID NO:5167 [symbol] n represents t or deletion (Location 21).

[1382] SEQ ID NO:5168 [symbol] n represents tgat or deletion (Location 21).

[1383] SEQ ID NO:5169 [symbol] n represents 8 to 10 repeats of t (from Location 21).

[1384] SEQ ID NO:5170 [symbol] n represents a or deletion (Location 21).

[1385] SEQ ID NO:5187 [symbol] n represents gtg or deletion (Location 21).

[1386] SEQ ID NO:5189 [symbol] n represents gg or tggtggggtgga (Location 21).

[1387] SEQ ID NO:5209 [symbol] n represents acaaca or deletion (Location 21).

[1388] SEQ ID NO:5210 [symbol] n represents 11 to 13 repeats of t (from Location 21).

[1389] SEQ ID NO:5212 [symbol] n represents 15 to 18 repeats of ac (from Location 21).

[1390] SEQ ID NO:5218 [symbol] n represents 18 to 26 repeats of t (from Location 21).

[1391] SEQ ID NO:5227 [symbol] n represents tc or deletion (Location 21).

[1392] SEQ ID NO:5231 [symbol] n represents 16 to 18 repeats of t (from Location 21).

[1393] SEQ ID NO:5246 [symbol] n represents 18 to 20 repeats of t (from Location 21).

[1394] SEQ ID NO:5247 [symbol] n represents tggtaagt or deletion (Location 21).

[1395] SEQ ID NO:5249 [symbol] n represents t or deletion (Location 21).

[1396] SEQ ID NO:5255 [symbol] n represents g or deletion (Location 21).

[1397] SEQ ID NO:5256 [symbol] n represents g or deletion (Location 21).

[1398] SEQ ID NO:5257 [symbol] n represents c or deletion (Location 21).

[1399] SEQ ID NO:5258 [symbol] n represents ctct or deletion (Location 21).

[1400] SEQ ID NO:5261 [symbol] n represents a or deletion (Location 21).

[1401] SEQ ID NO:5264 [symbol] n represents t or deletion (Location 21).

[1402] SEQ ID NO:5271 [symbol] n represents 14 to 17 repeats of t (from Location 21).

[1403] SEQ ID NO:5276 [symbol] n represents 12 to 15 repeats of t (from Location 21).

[1404] SEQ ID NO:5277 [symbol] n represents 10 to 13 repeats of a (from Location 21).

[1405] SEQ ID NO:5278 [symbol] n represents 25 to 27 repeats of a (from Location 21).

[1406] SEQ ID NO:5299 [symbol] n represents c or deletion (Location 21).

[1407] SEQ ID NO:5308 [symbol] n represents 20 to 24 repeats of t (from Location 21).

[1408] SEQ ID NO:5311 [symbol] n represents t or deletion (Location 21).

[1409] SEQ ID NO:5312 [symbol] n represents t or deletion (Location 21).

[1410] SEQ ID NO:5314 [symbol] n represents g or deletion (Location 21).

[1411] SEQ ID NO:5320 [symbol] n represents 18 to 23 repeats of t (from Location 21).

[1412] SEQ ID NO:5340 [symbol] n represents c or deletion (Location 21).

[1413] SEQ ID NO:5400 [symbol] n represents a or deletion (Location 21).

[1414] SEQ ID NO:5404 [symbol] n represents a or deletion (Location 21).

[1415] SEQ ID NO:5407 [symbol] n represents tt or deletion (Location 21).

[1416] SEQ ID NO:5410 [symbol] n represents at or deletion (Location 21).

[1417] SEQ ID NO:5436 [symbol] n represents tgt or deletion (Location 21).

[1418] SEQ ID NO:5445 [symbol] n represents t or deletion (Location 21).

[1419] SEQ ID NO:5550 [symbol] n represents t or deletion (Location 21).

[1420] SEQ ID NO:5556 [symbol] n represents g or deletion (Location 21).

[1421] SEQ ID NO:5557 [symbol] n represents 11 to 13 repeats of t (from Location 21).

[1422] SEQ ID NO:5559 [symbol] n represents a or deletion (Location 21).

[1423] SEQ ID NO:5561 [symbol] n represents 9 to 11 repeats of t (from Location 21).

[1424] SEQ ID NO:5564 [symbol] n represents t or deletion (Location 21).

[1425] SEQ ID NO:5566 [symbol] n represents t or deletion (Location 21).

[1426] SEQ ID NO:5570 [symbol] n represents t or deletion (Location 21).

[1427] SEQ ID NO:5575 [symbol] n represents aaga or deletion (Location 21).

[1428] SEQ ID NO:5579 [symbol] n represents aaaa or deletion (Location 21).

[1429] SEQ ID NO:5583 [symbol] n represents 9 to 11 repeats of t (from Location 21).

[1430] SEQ ID NO:5591 [symbol] n represents a or deletion (Location 21).

[1431] SEQ ID NO:5614 [symbol] n represents 11 to 13 repeats of t (from Location 21).

[1432] SEQ ID NO:5630 [symbol] n represents acta or deletion (Location 21).

[1433] SEQ ID NO:5636 [symbol] n represents gtg or deletion (Location 21).

[1434] SEQ ID NO:5641 [symbol] n represents 11 to 12 repeats of t (from Location 21).

[1435] SEQ ID NO:5651 [symbol] n represents tta or deletion (Location 21).

[1436] SEQ ID NO:5665 [symbol] n represents g or deletion (Location 21).

[1437] SEQ ID NO:5667 [symbol] n represents a or deletion (Location 21).

[1438] SEQ ID NO:5669 [symbol] n represents cct or deletion (Location 21).

[1439] SEQ ID NO:5680 [symbol] n represents gga or deletion (Location 21).

[1440] SEQ ID NO:5690 [symbol] n represents 12 to 14 repeats of t (from Location 21).

[1441] SEQ ID NO:5695 [symbol] n represents 16 to 17 repeats of t (from Location 21).

[1442] SEQ ID NO:5707 [symbol] n represents g or deletion (Location 21).

[1443] SEQ ID NO:5740 [symbol] n represents c or deletion (Location 21).

[1444] SEQ ID NO:5800 [symbol] n represents ag or deletion (Location 21).

[1445] SEQ ID NO:5806 [symbol] n represents g or deletion (Location 21).

[1446] SEQ ID NO:5807 [symbol] n represents a or deletion (Location 21).

[1447] SEQ ID NO:5835 [symbol] n represents g or deletion (Location 21).

[1448] SEQ ID NO:5839 [symbol] n represents c or deletion (Location 21).

[1449] SEQ ID NO:5844 [symbol] n represents ct or deletion (Location 21).

[1450] SEQ ID NO:5846 [symbol] n represents gc or deletion (Location 21).

[1451] SEQ ID NO:5849 [symbol] n represents c or deletion (Location 21).

[1452] SEQ ID NO:5884 [symbol] n represents c or deletion (Location 21).

[1453] SEQ ID NO:5890 [symbol] n represents tc or deletion (Location 21).

[1454] SEQ ID NO:5902 [symbol] n represents c or deletion (Location 21).

[1455] SEQ ID NO:5904 [symbol] n represents g or deletion (Location 21).

[1456] SEQ ID NO:5917 [symbol] n represents a or deletion (Location 21).

[1457] SEQ ID NO:5921 [symbol] n represents ca or deletion (Location 21).

[1458] SEQ ID NO:5922 [symbol] n represents t or deletion (Location 21).

[1459] SEQ ID NO:5934 [symbol] n represents ct or deletion (Location 21).

[1460] SEQ ID NO:5965 [symbol] n represents a or deletion (Location 21).

[1461] SEQ ID NO:5980 [symbol] n represents t or deletion (Location 21).

[1462] SEQ ID NO:5981 [symbol] n represents t or deletion (Location 21).

[1463] SEQ ID NO:5981 [symbol] n represents 11 to 13 repeats of t (from Location 21).

[1464] SEQ ID NO:5987 [symbol] n represents t or deletion (Location 21).

[1465] SEQ ID NO:5989 [symbol] n represents 16 to 8 repeats of t (from Location 21).

[1466] SEQ ID NO:5991 [symbol] n represents ctta or deletion (Location 21).

[1467] SEQ ID NO:5992 [symbol] n represents c or deletion (Location 21).

[1468] SEQ ID NO:5994 [symbol] n represents 10 to 12 repeats of a (from Location 21).

[1469] SEQ ID NO:5995 [symbol] n represents gt or deletion (Location 21).

[1470] SEQ ID NO:5996 [symbol] n represents a or deletion (Location 21).

[1471] SEQ ID NO:6001 [symbol] n represents aatt or deletion (Location 21).

[1472] SEQ ID NO:6003 [symbol] n represents t or deletion (Location 21).

[1473] SEQ ID NO:6009 [symbol] n represents g or deletion (Location 21).

[1474] SEQ ID NO:6021 [symbol] n represents at or deletion (Location 21).

[1475] SEQ ID NO:6027 [symbol] n represents 4 to 5 repeats of caaaa (from Location 21).

[1476] SEQ ID NO:6036 [symbol] n represents 9 to 10 repeats of a (from Location 21).

[1477] SEQ ID NO:6041 [symbol] n represents a or deletion (Location 21).

[1478] SEQ ID NO:6047 [symbol] n represents t or deletion (Location 21).

[1479] SEQ ID NO:6051 [symbol] n represents t or deletion (Location 21).

[1480] SEQ ID NO:6052 [symbol] n represents g or deletion (Location 21).

[1481] SEQ ID NO:6060 [symbol] n represents t or deletion (Location 21).

[1482] SEQ ID NO:6061 [symbol] n represents t or deletion (Location 21).

[1483] SEQ ID NO:6062 [symbol] n represents a or deletion (Location 21).

[1484] SEQ ID NO:6072 [symbol] n represents gaa or deletion (Location 21).

[1485] SEQ ID NO:6073 [symbol] n represents ag or deletion (Location 21).

[1486] SEQ ID NO:6089 [symbol] n represents 9 to 11 repeats of t (from Location 21).

[1487] SEQ ID NO:6090 [symbol] n represents a or deletion (Location 21).

[1488] SEQ ID NO:6091 [symbol] n represents t or deletion (Location 21).

[1489] SEQ ID NO:6173 [symbol] n represents tat or deletion (Location 21).

[1490] SEQ ID NO:6174 [symbol] n represents 14 to 17 repeats of ac (from Location 21).

[1491] SEQ ID NO:6175 [symbol] n represents 16 to 27 repeats of a (from Location 21).

[1492] SEQ ID NO:6176 [symbol] n represents t or deletion (Location 21).

[1493] SEQ ID NO:6177 [symbol] n represents 8 to 10 repeats of a (from Location 21).

[1494] SEQ ID NO:6178 [symbol] n represents 9 to 11 repeats of gt (from Location 21).

[1495] SEQ ID NO:6179 [symbol] n represents aa or deletion (Location 21).

[1496] SEQ ID NO:6180 [symbol] n represents t or deletion (Location 21).

[1497] SEQ ID NO:6181 [symbol] n represents 8 to 12 repeats of ac (from Location 21).

[1498] SEQ ID NO:6182 [symbol] n represents a or deletion (Location 21).

[1499] SEQ ID NO:6202 [symbol] n represents agg or deletion (Location 21).

[1500] SEQ ID NO:6204 [symbol] n represents 11 to 15 repeats of a (from Location 21).

[1501] SEQ ID NO:6205 [symbol] n represents 11 to 14 repeats of a (from Location 21).

[1502] SEQ ID NO:6208 [symbol] n represents gt or deletion (Location 21).

[1503] SEQ ID NO:6224 [symbol] n represents ta or deletion (Location 21).

[1504] SEQ ID NO:6307 [symbol] n represents 16 to 19 repeats of a (from Location 21).

[1505] SEQ ID NO:6308 [symbol] n represents aa or deletion (Location 21).

[1506] SEQ ID NO:6310 [symbol] n represents t or deletion (Location 21).

[1507] SEQ ID NO:6311 [symbol] n represents 10 to 12 repeats of t (from Location 21).

[1508] SEQ ID NO:6312 [symbol] n represents aa or deletion (Location 21).

[1509] SEQ ID NO:6313 [symbol] n represents ttgacagtccaatat, ttgaca, gtccaatat or deletion (Location 21).

[1510] SEQ ID NO:6314 [symbol] n represents cta or deletion (Location 21).

[1511] SEQ ID NO:6315 [symbol] n represents a or deletion (Location 21).

[1512] SEQ ID NO:6317 [symbol] n represents 9 to 11 repeats of t (From Location 21).

[1513] SEQ ID NO:6318 [symbol] n represents c or deletion (Location 21).

[1514] SEQ ID NO:6320 [symbol] n represents gagatgttgtggctcacat or deletion (Location 21).

[1515] SEQ ID NO:6322 [symbol] n represents cc or deletion (Location 21).

[1516] SEQ ID NO:6323 [symbol] n represents act or deletion (Location 21).

[1517] SEQ ID NO:6405 [symbol] n represents a or deletion (Location 21).

[1518] SEQ ID NO:6415 [symbol] n represents 8 to 11 repeats of t (from Location 21).

[1519] SEQ ID NO:6416 [symbol] n represents 10 to 13 repeats of t (from Location 21).

[1520] SEQ ID NO:6472 [symbol] n represents g or deletion (Location 21).

[1521] SEQ ID NO:6473 [symbol] n represents c or deletion (Location 21).

[1522] SEQ ID NO:6554 [symbol] n represents t or deletion (Location 21).

[1523] SEQ ID NO:6555 [symbol] n represents 12 to 15 repeats of t (from Location 21).

[1524] SEQ ID NO:6609 [symbol] n represents a or deletion (Location 21).

[1525] SEQ ID NO:6610 [symbol] n represents at or deletion (Location 21).

[1526] SEQ ID NO:6725 [symbol] n represents 16 repeats of cctgc or 16 repeats of cctgt (from Location 21).

[1527] SEQ ID NO:6726 [symbol] n represents t or deletion (Location 21).

[1528] SEQ ID NO:6728 [symbol] n represents c or deletion (Location 21).

[1529] SEQ ID NO:6739 [symbol] n represents acac or deletion (Location 21).

[1530] SEQ ID NO:6748 [symbol] n represents gatttgtggtatccag or deletion (Location 21).

[1531] SEQ ID NO:6750 [symbol] n represents ag or deletion (Location 21).

[1532] SEQ ID NO:6751 [symbol] n represents ta or deletion (Location 21).

[1533] SEQ ID NO:6757 [symbol] n represents t or deletion (Location 21).

[1534] SEQ ID NO:6759 [symbol] n represents 12 to 14 repeats of gt from Location 21).

[1535] SEQ ID NO:6771 [symbol] n represents cagaggct or deletion (Location 21).

[1536] SEQ ID NO:6772 [symbol] n represents ct or deletion (Location 21).

[1537] SEQ ID NO:6773 [symbol] n represents ag or deletion (Location 21).

[1538] SEQ ID NO:6785 [symbol] n represents gtaaa or deletion (Location 21).

[1539] SEQ ID NO:6786 [symbol] n represents aaaaa or deletion (Location 21).

[1540] SEQ ID NO:6787 [symbol] n represents a or deletion (Location 21).

[1541] SEQ ID NO:6828 [symbol] n represents tc or deletion (Location 21).

[1542] SEQ ID NO:6830 [symbol] n represents t or deletion (Location 21).

[1543] SEQ ID NO:6831 [symbol] n represents t or deletion (Location 21).

[1544] SEQ ID NO:6832 [symbol] n represents gaagaaactgttgacagttt or deletion (Location 21).

[1545] SEQ ID NO:6833 [symbol] n represents cct or deletion (Location 21).

[1546] SEQ ID NO:6834 [symbol] n represents tttc or deletion (Location 21).

[1547] SEQ ID NO:6835 [symbol] n represents ttcttttaaaattg or deletion (Location 21).

[1548] SEQ ID NO:6837 [symbol] n represents ttcaggccttt or deletion (Location 21).

[1549] SEQ ID NO:6839 [symbol] n represents ggcctg or deletion (Location 21).

[1550] SEQ ID NO:6841 [symbol] n represents a or deletion (Location 21).

[1551] SEQ ID NO:6870 [symbol] n represents 9 to 11 repeats of c (from Location 21).

[1552] SEQ ID NO:6871 [symbol] n represents 15 to 21 repeats of a (from Location 21).

[1553] SEQ ID NO:6872 [symbol] n represents ggggtggcggggtggg or deletion (Location 21).

[1554] SEQ ID NO:6873 [symbol] n represents t or deletion (Location 21).

[1555] SEQ ID NO:6874 [symbol] n represents a or deletion (Location 21).

[1556] SEQ ID NO:6876 [symbol] n represents a or deletion (Location 21).

[1557] SEQ ID NO:6877 [symbol] n represents 10 to 12 repeats of t (from Location 21).

[1558] SEQ ID NO:6878 [symbol] n represents tt or deletion (Location 21).

[1559] SEQ ID NO:6880 [symbol] n represents tccctccttgaagctgatcgt or deletion (Location 21).

[1560] SEQ ID NO:6881 [symbol] n represents 12 to 18 repeats of ca (from Location 21).

[1561] SEQ ID NO:6894 [symbol] n represents gtt or deletion (Location 21).

[1562] SEQ ID NO:6897 [symbol] n represents ga or deletion (Location 21).

[1563] SEQ ID NO:6921 [symbol] n represents t or deletion (Location 21).

[1564] SEQ ID NO:6940 [symbol] n represents t or deletion (Location 21).

[1565] SEQ ID NO:6941 [symbol] n represents t or deletion (Location 21).

[1566] SEQ ID NO:6942 [symbol] n represents t or deletion (Location 21).

[1567] SEQ ID NO:6965 [symbol] n represents at or deletion (Location 21).

[1568] SEQ ID NO:6966 [symbol] n represents a or deletion (Location 21).

[1569] SEQ ID NO:6967 [symbol] n represents c or deletion (Location 21).

[1570] SEQ ID NO:6997 [symbol] n represents c or deletion (Location 21).

[1571] SEQ ID NO:7005 [symbol] n represents t or deletion (Location 21).

[1572] SEQ ID NO:7006 [symbol] n represents ttc or deletion (Location 21).

[1573] SEQ ID NO:7017 [symbol] n represents ctt or deletion (Location 21).

[1574] SEQ ID NO:7049 [symbol] n represents 8 to 9 repeats of a (from Location 21).

[1575] SEQ ID NO:7053 [symbol] n represents 10 to 12 repeats of t (from Location 21).

[1576] SEQ ID NO:7059 [symbol] n represents 22 to 25 repeats of t (from Location 21).

[1577] SEQ ID NO:7070 [symbol] n represents t or deletion (Location 21).

[1578] SEQ ID NO:7073 [symbol] n represents a or deletion (Location 21).

[1579] SEQ ID NO:7074 [symbol] n represents a or deletion (Location 21).

[1580] SEQ ID NO:7076 [symbol] n represents c or deletion (Location 21).

[1581] SEQ ID NO:7077 [symbol] n represents 10 to 12 repeats of t (from Location 21).

[1582] SEQ ID NO:7078 [symbol] n represents a or deletion (Location 21).

[1583] SEQ ID NO:7079 [symbol] n represents 9 to 11 repeats of t (from Location 21).

[1584] SEQ ID NO:7082 [symbol] n represents a or deletion (Location 21).

[1585] SEQ ID NO:7085 [symbol] n represents t or deletion (Location 21).

[1586] SEQ ID NO:7089 [symbol] n represents a or deletion (Location 21).

[1587] SEQ ID NO:7101 [symbol] n represents a or deletion (Location 21).

[1588] SEQ ID NO:7105 [symbol] n represents a or deletion (Location 21).

[1589] SEQ ID NO:7114 [symbol] n represents 9 to 10 repeats of t (from Location 21).

[1590] SEQ ID NO:7115 [symbol] n represents aag or deletion (Location 21).

[1591] SEQ ID NO:7117 [symbol] n represents t or deletion (Location 21).

[1592] SEQ ID NO:7118 [symbol] n represents t or deletion (Location 21).

[1593] SEQ ID NO:7120 [symbol] n represents t or deletion (Location 21).

[1594] SEQ ID NO:7121 [symbol] n represents t or deletion (Location 21).

[1595] SEQ ID NO:7123 [symbol] n represents t or deletion (Location 21).

[1596] SEQ ID NO:7125 [symbol] n represents a or deletion (Location 21).

[1597] SEQ ID NO:7127 [symbol] n represents a or deletion (Location 21).

[1598] SEQ ID NO:7134 [symbol] n represents 7 to 8 repeats of gt (from Location 21).

[1599] SEQ ID NO:7146 [symbol] n represents cat or deletion (Location 21).

[1600] SEQ ID NO:7148 [symbol] n represents tc or deletion (Location 21).

[1601] SEQ ID NO:7164 [symbol] n represents ca or deletion (Location 21).

[1602] SEQ ID NO:7186 [symbol] n represents g or deletion (Location 21).

[1603] SEQ ID NO:7209 [symbol] n represents t or deletion (Location 21).

[1604] SEQ ID NO:7238 [symbol] n represents gccag or deletion (Location 21).

[1605] SEQ ID NO:7278 [symbol] n represents a or deletion (Location 21).

[1606] SEQ ID NO:7281 [symbol] n represents g or deletion (Location 21).

[1607] SEQ ID NO:7282 [symbol] n represents t or deletion (Location 21).

[1608] SEQ ID NO:7287 [symbol] n represents aaa or deletion (Location 21).

[1609] SEQ ID NO:7288 [symbol] n represents a or deletion (Location 21).

[1610] SEQ ID NO:7299 [symbol] n represents c or deletion (Location 21).

[1611] SEQ ID NO:7329 [symbol] n represents 17 to 19 repeats of a (from Location 21).

[1612] SEQ ID NO:7332 [symbol] n represents 16 to 18 repeats of a (from Location 21).

[1613] SEQ ID NO:7333 [symbol] n represents 4 to 6 repeats of ga (from Location 21).

[1614] SEQ ID NO:7346 [symbol] n represents a or deletion (Location 21).

[1615] SEQ ID NO:7375 [symbol] n represents 2 to 3 repeats of tc (from Location 21).

[1616] SEQ ID NO:7381 [symbol] n represents 6 to 7 repeats of a (from Location 21).

[1617] SEQ ID NO:7383 [symbol] n represents 13 to 15 repeats of a (from Location 21).

[1618] SEQ ID NO:7385 [symbol] n represents 9 to 10 repeats of t (from Location 21).

[1619] SEQ ID NO:7387 [symbol] n represents 12 to 14 repeats of a (from Location 21).

[1620] SEQ ID NO:7389 [symbol] n represents 14 to 17 repeats of t (from Location 21).

[1621] SEQ ID NO:7390 [symbol] n represents 8 to 9 repeats of a (from Location 21).

[1622] SEQ ID NO:7397 [symbol] n represents g or deletion (Location 21).

[1623] SEQ ID NO:7417 [symbol] n represents 14 to 17 repeats of t (from Location 21).

[1624] SEQ ID NO:7421 [symbol] n represents 7 to 9 repeats of g (from Location 21).

[1625] SEQ ID NO:7426 [symbol] n represents 9 to 10 repeats of a (from Location 21).

[1626] SEQ ID NO:7434 [symbol] n represents 9 to 10 repeats of a (from Location 21).

[1627] SEQ ID NO:7436 [symbol] n represents 6 to 7 repeats of g (from Location 21).

[1628] SEQ ID NO:7443 [symbol] n represents g or dele t ion (Location 21).

[1629] SEQ ID NO:7458 [symbol] n represents 8 to 9 repeats of a (from Location 21).

[1630] SEQ ID NO:7461 [symbol] n represents 4 to 6 repeats of c (from Location 21).

[1631] SEQ ID NO:7483 [symbol] n represents ggcgaaggcggcggc or deletion (Location 21).

[1632] SEQ ID NO:7485 [symbol] n represents ata or deletion (Location 21).

[1633] SEQ ID NO:7488 [symbol] n represents 11 to 12 repeats of t (from Location 21).

[1634] SEQ ID NO:7489 [symbol] n represents 12 to 14 repeats of t (from Location 21).

[1635] SEQ ID NO:7493 [symbol] n represents 9 to 10 repeats of t (from Location 21).

[1636] SEQ ID NO:7495 [symbol] n represents 6 to 7 repeats of ta (from Location 21).

[1637] SEQ ID NO:7497 [symbol] n represents tgtatacgtatacatacgtatacatatatacatacgtatata or deletion (Location 21).

[1638] SEQ ID NO:7503 [symbol] n represents attt or deletion (Location 21).

[1639] SEQ ID NO:7510 [symbol] n represents cct or deletion (Location 21).

[1640] SEQ ID NO:7519 [symbol] n represents tgtt or deletion (Location 21).

[1641] SEQ ID NO:7520 [symbol] n represents a or deletion (Location 21).

[1642] SEQ ID NO:7531 [symbol] n represents 9 to 10 repeats of t (from Location 21).

[1643] SEQ ID NO:7538 [symbol] n represents a or deletion (Location 21).

[1644] SEQ ID NO:7566 [symbol] n represents a or deletion (Location 21).

[1645] SEQ ID NO:7615 [symbol] n represents a or deletion (Location 21).

[1646] SEQ ID NO:7649 [symbol] n represents gtg or deletion (Location 21).

[1647] SEQ ID NO:7651 [symbol] n represents gg or tggtggggtgga (Location 21).

[1648] SEQ ID NO:7667 [symbol] n represents ct or deletion (Location 21).

[1649] All publications and patents mentioned in the above specification are herein incorporated by reference. Various modifications and variations of the described method and system of the invention will be apparent to those skilled in the art without departing from the scope and spirit of the invention. Although the invention has been described in connection with specific preferred embodiments, it should be understood that the invention as claimed should not be unduly limited to such specific embodiments. Indeed, various modifications of the described modes for carrying out the invention which are obvious to those skilled in the relevant fields are intended to be within the scope of the following claims.

The application's sequence listing, which the Patent Office published only in electronic form, follows.

SEQUENCE LISTING (7669 sequences)

SEQ ID NO: 1 - DNA, 41 bp, Homo sapiens
agctaagagtcaaagcacccsctttttccaccagcctcgcg

SEQ ID NO: 2 - DNA, 41 bp, Homo sapiens
ccaccagcctcgcgtgcctgktcccttcacggacactctag

SEQ ID NO: 3 - DNA, 41 bp, Homo sapiens
ttgcaagcgctggctgctacmggcgacctccctgcgctccc

SEQ ID NO: 4 - DNA, 41 bp, Homo sapiens
gctttgcgcgcggcgctaacktgtgtagggcagatctgccc

SEQ ID NO: 5 - DNA, 41 bp, Homo sapiens
aaggaaactgaggccaagacyctaaatgctgaaactgcaca

SEQ ID NO: 6 - DNA, 41 bp, Homo sapiens
ccctcaccatggtcaccctgrtcaccctgcctctgcttttc

SEQ ID NO: 7 - DNA, 41 bp, Homo sapiens
gtatttctttagcatccaagkggcatagctgtgtctctttc

SEQ ID NO: 8 - DNA, 41 bp, Homo sapiens
atttctttagcatccaagggscatagctgtgtctctttctc

SEQ ID NO: 9 - DNA, 41 bp, Homo sapiens
ttccttcaggttaatgactgyggttctttgtgtcccctcca

SEQ ID NO: 10 - DNA, 41 bp, Homo sapiens
gtctctgcccttgtctttgcygcttcttctatctctactcc

SEQ ID NO: 11 - DNA, 41 bp, Homo sapiens
agcgcacttttcagctgcggrtgtctcctcttttatcatcc

SEQ ID NO: 12 - DNA, 41 bp, Homo sapiens
aactgcatcaccttttccctyaagctttttaattcctatga

SEQ ID NO: 13 - DNA, 41 bp, Homo sapiens
cattcagggaggcccaggtcrtgtgacgtcgacagttgctg

SEQ ID NO: 14 - DNA, 41 bp, Homo sapiens
aacacccttattttatagatycaatgactgagtcaagaatt

SEQ ID NO: 15 - DNA, 41 bp, Homo sapiens
cagcatctctacttataccaygctctgctttaaggttctct

SEQ ID NO: 16 - DNA, 41 bp, Homo sapiens
actcaaataggtggtaggagyagagacaattcaatacagac

SEQ ID NO: 17 - DNA, 41 bp, Homo sapiens
gagcagagacaattcaatacrgacagaagtcttagatgaga

SEQ ID NO: 18 - DNA, 41 bp, Homo sapiens
tagttttgccatgtagaattsaaaaagtgatagatggtgtt

SEQ ID NO: 19 - DNA, 41 bp, Homo sapiens
gttaagcctgcttcaatcaarttagttatattcttgttcta

SEQ ID NO: 20 - DNA, 41 bp, Homo sapiens
ttgacttagcgacactgttarcatacttatctttcctgtgt

SEQ ID NO: 21 - DNA, 41 bp, Homo sapiens
ccttgctgcacctgtgctgtmtaagtttggcttattatagt

SEQ ID NO: 22 - DNA, 41 bp, Homo sapiens
agtagagacaggctggcgatsacaccggacagagctaactg

SEQ ID NO: 23 - DNA, 41 bp, Homo sapiens
aacagaatcatgaaattaagytgttaatgatttgaaggcct

SEQ ID NO: 24 - DNA, 41 bp, Homo sapiens
aggataaattgtttatgtcgyctgggtaccatcatggccat

SEQ ID NO: 25 - DNA, 41 bp, Homo sapiens
ctggttgactccagatatcayagaaggagttgtaaaattct

SEQ ID NO: 26 - DNA, 41 bp, Homo sapiens
aatacacaggaagcttctaartaaagtaaggaagtcactct

SEQ ID NO: 27 - DNA, 41 bp, Homo sapiens
ctaaagagtgaatggattcartacgtcccttggaactcacc

SEQ ID NO: 28 - DNA, 41 bp, Homo sapiens
ctgaggttccagcttatctcwtagagatgtttacttagtct

SEQ ID NO: 29 - DNA, 41 bp, Homo sapiens
tgttagaagaaaaaaaggttyatattacaagagggtctgac

SEQ ID NO: 30 - DNA, 41 bp, Homo sapiens
cccaagatatcttcataactstccatagtgcctagggtgcc

SEQ ID NO: 31 - DNA, 41 bp, Homo sapiens
tttacccagattcacctattrttatcatttttgctcccaaa

SEQ ID NO: 32 - DNA, 41 bp, Homo sapiens
tgtcctatacagtttttgttwtaagtttagtaaattgatta

SEQ ID NO: 33 - DNA, 41 bp, Homo sapiens
tccagcttgggtgacagagtragacttcatctcaaaaaaaa

SEQ ID NO: 34 - DNA, 41 bp, Homo sapiens
tactcttggggagcctatcascagggtgggtcagatatagc

SEQ ID NO: 35 - DNA, 41 bp, Homo sapiens
tgtttcttttctgtccagatwctctcggcatttagtgacaa

SEQ ID NO: 36 - DNA, 41 bp, Homo sapiens
cagaccacactaaccctcagytggacctcaggatgtcagtg

SEQ ID NO: 37 - DNA, 41 bp, Homo sapiens
tgtggataagaaaatagcatrtggttagaccatttgtgaaa

SEQ ID NO: 38 - DNA, 41 bp, Homo sapiens
cagtcggtttggaagcttgcyaccctttcttcacttcctca

SEQ ID NO: 39 - DNA, 41 bp, Homo sapiens
tttatcttcacttatgtttttctcagttaagttatgctaat

SEQ ID NO: 40 - DNA, 40 bp, Homo sapiens
tttatcttcacttatgttttctcagttaagttatgctaat

SEQ ID NO: 41 - DNA, 41 bp, Homo sapiens
cttgcaaatgttgctcttccrcaaaaaaaaaaggaaaggat

SEQ ID NO: 42 - DNA, 41 bp, Homo sapiens
agtatctcctaaactcttgcyatgcaggaaaaattatttta

SEQ ID NO: 43 - DNA, 41 bp, Homo sapiens
gaaatattttactgtattaaygtctagaacttaaatataag

SEQ ID NO: 44 - DNA, 41 bp, Homo sapiens
ctgagtcttcctatacatctwttccattcctcggatgctgt

SEQ ID NO: 45 - DNA, 41 bp, Homo sapiens
cttctcttaccttgaattctmggctctcgaactttgacttt

SEQ ID NO: 46 - DNA, 41 bp, Homo sapiens
agaaaatgaaattgccctacygagctaactctgaaagcaca

SEQ ID NO: 47 - DNA, 41 bp, Homo sapiens
tgcaaaatgtgtcttactagyttctagtgcataaaatattg

SEQ ID NO: 48 - DNA, 41 bp, Homo sapiens
aaatattggtggagctcttcrctgtgctgggccagtcacca

SEQ ID NO: 49 - DNA, 41 bp, Homo sapiens
aatccagagagggagatagaktggaagttcaagggtggaca

SEQ ID NO: 50 - DNA, 41 bp, Homo sapiens
ttccaagacagagcgaggggygctgctggggcgtggtttgc

SEQ ID NO: 51 - DNA, 41 bp, Homo sapiens
aactcgatgctttctcctccktctgggtcctaactgcagtg

SEQ ID NO: 52 - DNA, 41 bp, Homo sapiens
gaaatgtaacaggcaacactrtggacacagaaagtagatta

SEQ ID NO: 53 - DNA, 41 bp, Homo sapiens
atttccaaaatctgtttgggkgtaactgaaacacttgggaa

SEQ ID NO: 54 - DNA, 41 bp, Homo sapiens
taccctcacttcaagactaarattgaaggtatgtttgcaaa

SEQ ID NO: 55 - DNA, 41 bp, Homo sapiens
ctgtcaataccatgaaggggsggcgggggcactaagggtgg

SEQ ID NO: 56 - DNA, 41 bp, Homo sapiens
agaggttccataactgccccrtcctcgccaagggtgggccc

SEQ ID NO: 57 - DNA, 41 bp, Homo sapiens
aagggtgggcccggtgttccyaccaggctctccttccggcg

SEQ ID NO: 58 - DNA, 41 bp, Homo sapiens
gcagtgcctgaggcacgttgrcttggatcctcctgtctgta

SEQ ID NO: 59 - DNA, 41 bp, Homo sapiens
tgctggaccaagctctgggayagccctgagcagaactcccc

SEQ ID NO: 60 - DNA, 41 bp, Homo sapiens
gatgtggagctgctgtacccygtcaaggagaaggtattcta

SEQ ID NO: 61 - DNA, 41 bp, Homo sapiens
ggtgcctggctcccgggcggmcctcagtaccgctccccagt

SEQ ID NO: 62 - DNA, 41 bp, Homo sapiens
tggccctcccagaaaagagarggccctcagtgaggggagag

SEQ ID NO: 63 - DNA, 41 bp, Homo sapiens
aggtgcagactcatgcactcrgccctgaagaggtgagagag

SEQ ID NO: 64 - DNA, 41 bp, Homo sapiens
aaagtcactggatatgccccctcccccgccccccaacacgg

SEQ ID NO: 65 - DNA, 40 bp, Homo sapiens
aaagtcactggatatgcccctcccccgccccccaacacgg

SEQ ID NO: 66 - DNA, 41 bp, Homo sapiens
aaagtcactggatatgccccycccccgccccccaacacggt

SEQ ID NO: 67 - DNA, 41 bp, Homo sapiens
aagtcactggatatgcccctyccccgccccccaacacggtc

SEQ ID NO: 68 - DNA, 41 bp, Homo sapiens
actggatatgcccctcccccsccccccaacacggtcttatg

SEQ ID NO: 69 - DNA, 41 bp, Homo sapiens
ctggatatgcccctcccccgscccccaacacggtcttatgt

SEQ ID NO: 70 - DNA, 41 bp, Homo sapiens
tggctgcttctcaatgaataygaacagtgtctgtttccatg

SEQ ID NO: 71 - DNA, 41 bp, Homo sapiens
gagcattaggtcagaatccaytgaagtgagctttgagatca

SEQ ID NO: 72 - DNA, 41 bp, Homo sapiens
gtgtgtctctactttaatctrcaaaaggtgattgaatggag

SEQ ID NO: 73 - DNA, 41 bp, Homo sapiens
caagagtgggatgttcaaggycatcctgacctcacttttga

SEQ ID NO: 74 - DNA, 41 bp, Homo sapiens
tctgctcctcccggtgggtgygctgtcttgcagctgtctta

SEQ ID NO: 75 - DNA, 41 bp, Homo sapiens
atgtcgtgaagactgatgaaygatggacggctgcactgctc

SEQ ID NO: 76 - DNA, 41 bp, Homo sapiens
gaacaggatggagatgagctygtttatttgtcttttaatga

SEQ ID NO: 77 - DNA, 41 bp, Homo sapiens
tgaagagacctcgacatgtckcatcccacatactacaggga

SEQ ID NO: 78 - DNA, 41 bp, Homo sapiens
atcttctcagctgagcaaacygaggctcagagggcttaacc

SEQ ID NO: 79 - DNA, 41 bp, Homo sapiens
ttaaccccaactggcccaagrccaggtacatgattgggtca

SEQ ID NO: 80 - DNA, 41 bp, Homo sapiens
aagtcctttcaagagattatyataagtagtaccttctcatt

SEQ ID NO: 81 - DNA, 41 bp, Homo sapiens
agattattataagtagtaccktctcattataggaatattga

SEQ ID NO: 82 - DNA, 41 bp, Homo sapiens
cctgagtcggactttcaaaakcctcttcagagcaagcgatg

SEQ ID NO: 83 - DNA, 41 bp, Homo sapiens
ttgtcgtaacagggttttcakatgagcatatttcctttgta

SEQ ID NO: 84 - DNA, 41 bp, Homo sapiens
atgcataaagtctgtgaagcrggtaagagacatgcttggga

SEQ ID NO: 85 - DNA, 41 bp, Homo sapiens
ggattgagagcttacctctaygggggtcacctcgtgtatgc

SEQ ID NO: 86 - DNA, 41 bp, Homo sapiens
attcccttattccttcacacygtctgtcactcattcattca

SEQ ID NO: 87 - DNA, 41 bp, Homo sapiens
gcacaggctgggtatgaagcyggggctgcatgctcagctac

SEQ ID NO: 88 - DNA, 41 bp, Homo sapiens
agagggttttcactacttttyagtcatggctcctcagagaa

SEQ ID NO: 89 - DNA, 41 bp, Homo sapiens
tcctcatttgtcaagcagaasatgagtttccaatctctggg

SEQ ID NO: 90 - DNA, 41 bp, Homo sapiens
gtaagtgaacacactgctacrtgccagacttcctgccagac

SEQ ID NO: 91 - DNA, 41 bp, Homo sapiens
gtcattatcatcatatgaccratgaaaatgaccaaactgca

SEQ ID NO: 92 - DNA, 41 bp, Homo sapiens
aggtggccttacacacatctygcatggatggcagcattgtt

SEQ ID NO: 93 - DNA, 41 bp, Homo sapiens
tgttcacggagaatgcacggyatggggatgaaccctttccc

SEQ ID NO: 94 - DNA, 41 bp, Homo sapiens
tagccacctgcctttctcccrgcttccctagcagagtttgc

SEQ ID NO: 95 - DNA, 41 bp, Homo sapiens
ctcggaaagctgagctcaggragacagctgtccccggggtg

SEQ ID NO: 96 - DNA, 41 bp, Homo sapiens
cactgacctccttgccctgaragaaggccggctcctgtgct

SEQ ID NO: 97 - DNA, 41 bp, Homo sapiens
ataattttcctgacgagctcwagtgctccctctggtctaca

SEQ ID NO: 98 - DNA, 41 bp, Homo sapiens
ccccactaatgtgagtcatayagatggagtctcagggcacg

SEQ ID NO: 99 - DNA, 41 bp, Homo sapiens
ggataaaaacgaatattggtrtagcgattccacagtttaca

SEQ ID NO: 100 - DNA, 41 bp, Homo sapiens
agataggcccatgtgtgtgcrtgttagtaaatttgtgtatg

SEQ ID NO: 101 - DNA, 41 bp, Homo sapiens
gctgtagccatccaagcctayagaacttggctgtgagtgtg

SEQ ID NO: 102 - DNA, 41 bp, Homo sapiens
atcatctgactggtaagttcyagttctgtggtaactcaagt

SEQ ID NO: 103 - DNA, 41 bp, Homo sapiens
atttcatggagggaagtccayggtagaagcaggctgctagg

SEQ ID NO: 104 - DNA, 41 bp, Homo sapiens
ggctcagtggttggggcccartggttcatctaggacgggac

SEQ ID NO: 105 - DNA, 41 bp, Homo sapiens
aagaggtgaatggctgcgggrggctggagaagagagatggg

SEQ ID NO: 106 - DNA, 41 bp, Homo sapiens
agctcagcagacctcctggcygtggtgggtagctcctttcc

SEQ ID NO: 107 - DNA, 41 bp, Homo sapiens
actgtccagacgggagtatcycactgcttggtgagccccac

SEQ ID NO: 108 - DNA, 41 bp, Homo sapiens
accgtccccagctggccccarcctcctgacatgggcctctg

SEQ ID NO: 109 - DNA, 41 bp, Homo sapiens
ctggagccaggctgcagccgmagtgcctggccatcctggcg

SEQ ID NO: 110 - DNA, 41 bp, Homo sapiens
gtccaggcactgtggccctaygtgggagtctccagtctcca

SEQ ID NO: 111 - DNA, 41 bp, Homo sapiens
ggcagtggtccaaggaccagsatggactccctcttctcacc

SEQ ID NO: 112 - DNA, 41 bp, Homo sapiens
atctgtaccctcgcggactcyacctggcttcgtgccatcac

SEQ ID NO: 113 - DNA, 41 bp, Homo sapiens
cgcggactctacctggcttcrtgccatcacccccgccagat

SEQ ID NO: 114 - DNA, 41 bp, Homo sapiens
tcaggtgtcccctccctcatrcctcctcaccctgccctctc

SEQ ID NO: 115 - DNA, 41 bp, Homo sapiens
tgtaaggaatcctgccaagayggcagatgcacacggggtca

SEQ ID NO: 116 - DNA, 41 bp, Homo sapiens
ctcctgcacatgtgctccagrgaggaaaggcatttgacagg

SEQ ID NO: 117 - DNA, 41 bp, Homo sapiens
ggcatgtgtgtgtgtgtgtakgtgtgtgagtgtgtgcatgt

SEQ ID NO: 118 - DNA, 41 bp, Homo sapiens
tttctggaccagaaagcgtcrtcctctgccagggcctcttg

SEQ ID NO: 119 - DNA, 41 bp, Homo sapiens
gccagggcctcttgcacttgygggaaagctgagctgagctg

SEQ ID NO: 120 - DNA, 41 bp, Homo sapiens
ctgagctgggcagcagcattrctctgtgtgctgctggcact

SEQ ID NO: 121 - DNA, 41 bp, Homo sapiens
agcagcattactctgtgtgcygctggcactggcctggtggg

SEQ ID NO: 122 - DNA, 41 bp, Homo sapiens
gacaaagtgtacaacaaggtrtctcgaactgggtcagctca

SEQ ID NO: 123 - DNA, 41 bp, Homo sapiens
ccattcctgggtcttctttgraggctgaatgaaattccatg

SEQ ID NO: 124 - DNA, 41 bp, Homo sapiens
tctgccccactttgctcagasgtgcaacaaggccttcagga

SEQ ID NO: 125 - DNA, 41 bp, Homo sapiens
ggacactggcctgatgcagasgtgtggtctctctcctgcag

SEQ ID NO: 126 - DNA, 41 bp, Homo sapiens
ggccagggcacccctaccagsctgagtcccacctgtccagc

SEQ ID NO: 127 - DNA, 41 bp, Homo sapiens
tacccgccttcccagatggarcgggctgctcatgggactta

SEQ ID NO: 128 - DNA, 41 bp, Homo sapiens
tctggtcccctctcctgcttrtagtttcctgggctaaaatc

SEQ ID NO: 129 - DNA, 41 bp, Homo sapiens
tgggaccagtgccgccaccayggcccaaggacctggtgttc

SEQ ID NO: 130 - DNA, 41 bp, Homo sapiens
gggctccaggcacacagcggycccagtacacctgtcgcttt

SEQ ID NO: 131 - DNA, 41 bp, Homo sapiens
tccgtggaactcagagatggyacctccctgcgaggtggggc

SEQ ID NO: 132 - DNA, 41 bp, Homo sapiens
aactctcccctgctgctgagrcagatcttggagcctcggcc

SEQ ID NO: 133 - DNA, 41 bp, Homo sapiens
ccgccctgtgcttcatgcccyctatgcctctcactgcctgg

SEQ ID NO: 134 - DNA, 41 bp, Homo sapiens
gtcctgaggcccctcccaccrgagcctggggtgccctcaca

SEQ ID NO: 135 - DNA, 41 bp, Homo sapiens
gctgtgactgtcttggagacygggtcttggcgggcctggtg

SEQ ID NO: 136 - DNA, 41 bp, Homo sapiens
ccaggagcctctgaggcagcrggggcttctcaaccacacac

SEQ ID NO: 137 - DNA, 41 bp, Homo sapiens
attttgtcagcatgtcacgtycctttcataatgaagcaagg

SEQ ID NO: 138 - DNA, 41 bp, Homo sapiens
acagcactgcgggagccacgrcatctgcagacgcatttgat

SEQ ID NO: 139 - DNA, 41 bp, Homo sapiens
tggactctctggcgtccatcyagccacttcagtgcgacgtg

SEQ ID NO: 140 - DNA, 41 bp, Homo sapiens
ggctggctgggccctgggatsatcgtgacaggctttagtgg

SEQ ID NO: 141 - DNA, 41 bp, Homo sapiens
acaggtgggagccgaggctckggaggtgggccgggctgagc

SEQ ID NO: 142 - DNA, 41 bp, Homo sapiens
ccgcttccccgtgctctggcygtagcagaaagtgtcccact

SEQ ID NO: 143 - DNA, 41 bp, Homo sapiens
agcctcccactgccttgtggytgaggggagggggccgggtc

SEQ ID NO: 144 - DNA, 41 bp, Homo sapiens
tctaacgctgtcttctttgtwctgaaaaccaaacaccttct

SEQ ID NO: 145 - DNA, 41 bp, Homo sapiens
tgccgggcagcggggagggarggcgagtggttcccccaagt

SEQ ID NO: 146 - DNA, 41 bp, Homo sapiens
gtgcaggcgccctgcatcccygcagccaagttctgggcgga

SEQ ID NO: 147 - DNA, 41 bp, Homo sapiens
gacactgccctgagccaggayggtgaggtgggacgccttcc

SEQ ID NO: 148 - DNA, 41 bp, Homo sapiens
tgaggggttgggactctacaraggagagtggactcacgggg

SEQ ID NO: 149 - DNA, 41 bp, Homo sapiens
gacacctcttcactgtcagckctgagacacgcccctgccct

SEQ ID NO: 150 - DNA, 41 bp, Homo sapiens
caggccagttggaatcctacrtagagtgaaagcatctcagc

SEQ ID NO: 151 - DNA, 41 bp, Homo sapiens
taagcagttaacactgatgcrtgatgaaaattccaacagca

SEQ ID NO: 152 - DNA, 41 bp, Homo sapiens
cctccaggtggcaggaacacygtgaggagcatgcaacgtgc

SEQ ID NO: 153 - DNA, 41 bp, Homo sapiens
gtgggctgggacgccaggacrgtgaggggcttcaaggtgtg

SEQ ID NO: 154 - DNA, 41 bp, Homo sapiens
ctgggacgccaggacggtgargggcttcaaggtgtgtttgt

SEQ ID NO: 155 - DNA, 41 bp, Homo sapiens
ggaggagctgaaagagctggrgctcgggatcaggtggttca

SEQ ID NO: 156 - DNA, 41 bp, Homo sapiens
actttgaggcaccaccgcacmtgtccgtgcgtgagggagac

SEQ ID NO: 157 - DNA, 41 bp, Homo sapiens
tcccagtggtggctctgtccycgtctcagccgagcactcag

SEQ ID NO: 158 - DNA, 41 bp, Homo sapiens
ccgtctcagccgagcactcakcggccagggtggctggactc

SEQ ID NO: 159 - DNA, 41 bp, Homo sapiens
ccacaggccggatgccttgayacttctcagctgcagggctg

SEQ ID NO: 160 - DNA, 41 bp, Homo sapiens
tggagagaccacctcagacascaaggacgggcatgccatgg

SEQ ID NO: 161 - DNA, 41 bp, Homo sapiens
acctcagacagcaaggacggkcatgccatgggtcccggcag

SEQ ID NO: 162 - DNA, 41 bp, Homo sapiens
atgtctcaaatctccctcccygggaaatctaggcacaggtc

SEQ ID NO: 163 - DNA, 41 bp, Homo sapiens
caggcccaggagcaggtgggkcctcctcacaggagcagggc

SEQ ID NO: 164 - DNA, 41 bp, Homo sapiens
actctgagcatgctggctccytccttctttccagggcagca

SEQ ID NO: 165 - DNA, 41 bp, Homo sapiens
cctggttgtgcttcggacccrgaggcagacagaggaggcct

SEQ ID NO: 166 - DNA, 41 bp, Homo sapiens
acaatgactgttggagccctygagcaggctgtgtcacgtgg

SEQ ID NO: 167 - DNA, 41 bp, Homo sapiens
actgggggatcctgaatcccrcctcctgatgccagtggagc

SEQ ID NO: 168 - DNA, 41 bp, Homo sapiens
cacagtgtgaactgttaggcsacagccacatcttgccggag

SEQ ID NO: 169 - DNA, 41 bp, Homo sapiens
gagatgggggcggttcgggargcaaaagcaggaaggcagaa

SEQ ID NO: 170 - DNA, 41 bp, Homo sapiens
gcatgtgcatgggcagaggcygttcccatctgagtgggacc

SEQ ID NO: 171 - DNA, 41 bp, Homo sapiens
ggccgcgtgctcctgcagccwtgggctcctctggcagttct

SEQ ID NO: 172 - DNA, 41 bp, Homo sapiens
cccagggacagatcttctccrccagacgtctctttctgcct

SEQ ID NO: 173 - DNA, 41 bp, Homo sapiens
gcagataatgtgcagctgggrtgcatgtggttgttgctccc

SEQ ID NO: 174 - DNA, 41 bp, Homo sapiens
tggcctgctactctctaagcstcaccatcctgctcctgaac

SEQ ID NO: 175 - DNA, 41 bp, Homo sapiens
ggaggaagtcagcttcttacmgatggtggctcccagctttc

SEQ ID NO: 176 - DNA, 41 bp, Homo sapiens
ttttctcctctcaccttttgygttcagaggcagaggtgtgc

SEQ ID NO: 177 - DNA, 41 bp, Homo sapiens
gttgggccaggctctgacagraccctcgggaccagctcctg

SEQ ID NO: 178 - DNA, 41 bp, Homo sapiens
ggagccctggctgaagaagcsttacgaccaaggcctggagg

SEQ ID NO: 179 - DNA, 41 bp, Homo sapiens
ggacaggccgggggttgagcrgctgcatgaaggagggaggg

SEQ ID NO: 180 - DNA, 41 bp, Homo sapiens
tcaccagagtgatttcctcgmggcaggtgcctggggtagcc

SEQ ID NO: 181 - DNA, 41 bp, Homo sapiens
gaggcaggtgcctggggtagycactgggcggggtccatgag

SEQ ID NO: 182 - DNA, 41 bp, Homo sapiens
ggagagtaaggggtggggggrcacttaggacagggaagctg

SEQ ID NO: 183 - DNA, 41 bp, Homo sapiens
ccaggtggggccgtgtgcctstggcctggtgtgtggcccag

SEQ ID NO: 184 - DNA, 41 bp, Homo sapiens
cagggaagctgggccctgaaygagctgggcttttgggccac

SEQ ID NO: 185 - DNA, 41 bp, Homo sapiens
attattgtgagcatgggaagwgcacatttggtcacacatgt

SEQ ID NO: 186 - DNA, 41 bp, Homo sapiens
gcctggctagacgcccaccartgaccctgatgatggcagca

SEQ ID NO: 187 - DNA, 41 bp, Homo sapiens
tttggtccaggaagggggacrgcagccaggagcgtctggat

SEQ ID NO: 188 - DNA, 41 bp, Homo sapiens
atggagatgtgctcccccggsgggtcagaggacctgcggtc

SEQ ID NO: 189 - DNA, 41 bp, Homo sapiens
ctctgggggacgcataagccrcctccagaggacatcagcca

SEQ ID NO: 190 - DNA, 41 bp, Homo sapiens
gggcttccaggtgtctgagcyccccggcatgtaggacccca

SEQ ID NO: 191 - DNA, 41 bp, Homo sapiens
ggctttgggggaccctggacycatttctagaaaacagcctt

SEQ ID NO: 192 - DNA, 41 bp, Homo sapiens
ccagggctcccaggtcagagyggccatggtagcttacaatg

SEQ ID NO: 193 - DNA, 41 bp, Homo sapiens
tacttaggaggcgtcaggggytcacctggccatggccatgg

SEQ ID NO: 194 - DNA, 41 bp, Homo sapiens
gatgacactgtcattcctaartgaatggccttgtgctgacc

SEQ ID NO: 195 - DNA, 41 bp, Homo sapiens
ccaacgccggcattagtcgckcctgcgcacggccctgtgga

SEQ ID NO: 196 - DNA, 41 bp, Homo sapiens
cgttgcactgtaggactctcyccacgtcccctaatcccatc

SEQ ID NO: 197 - DNA, 41 bp, Homo sapiens
gcagttcccgcggatagagarggtccggtccttcccgctgt

SEQ ID NO: 198 - DNA, 41 bp, Homo sapiens
tgtgggtgaactgtaaaaaaytgcctgtattcaggaggata

SEQ ID NO: 199 - DNA, 41 bp, Homo sapiens
cttcaactaatctgggaacaytacactctgtttaattttca

SEQ ID NO: 200 - DNA, 41 bp, Homo sapiens
tgggaaagctgaaaagggatkctgagacctgtggttggggg

SEQ ID NO: 201 - DNA, 41 bp, Homo sapiens
ccgacggtcaaccctaccacyggggaggtcattgggcacgt

SEQ ID NO: 202 - DNA, 41 bp, Homo sapiens
cgtgaaagcagcccgggaagycttccgcctggggtccccat

SEQ ID NO: 203 - DNA, 41 bp, Homo sapiens
gcggggccggctgctgaacckcctggcagacctagtggagc

SEQ ID NO: 204 - DNA, 41 bp, Homo sapiens
acttgccccggcactcgccayaggcaacactgtggttatga

SEQ ID NO: 205 - DNA, 41 bp, Homo sapiens
aaagtgcaactgtaagacccrtagagaaaaactctggttcc

SEQ ID NO: 206 - DNA, 41 bp, Homo sapiens
tgccgaaatgcggcagatgaygactggggacctgaaccctc

SEQ ID NO: 207 - DNA, 41 bp, Homo sapiens
acttaccactctgtcctctcytgccaggcctcttcctgtca

SEQ ID NO: 208 - DNA, 41 bp, Homo sapiens
ccgcacatctgtaccctgccsccatcctccagcagagcagc

SEQ ID NO: 209 - DNA, 41 bp, Homo sapiens
tcagtcatgggttctctggtyccaacttcaccgctgactga

SEQ ID NO: 210 - DNA, 41 bp, Homo sapiens
aggaggccgggagtcaggccrccctcagaccctctggctca

SEQ ID NO: 211 - DNA, 41 bp, Homo sapiens
gggagtccctgggggaagcckcatgtagggaagcaggcctc

SEQ ID NO: 212 - DNA, 41 bp, Homo sapiens
ggataaggacatcagaggtgrgcgctaagccagcagcaggc

SEQ ID NO: 213 - DNA, 41 bp, Homo sapiens
atctcttacccacacccccascatggtggggaggttcctca

SEQ ID NO: 214 - DNA, 41 bp, Homo sapiens
ccatggtggggaggttcctcrtcctaagggatccgcagagc

SEQ ID NO: 215 - DNA, 41 bp, Homo sapiens
tccctgcctccctccttcagrgagctcagaaacaccttcaa

SEQ ID NO: 216 - DNA, 41 bp, Homo sapiens
ggaaacccctcagaaccaggytccaagccaaatgctttgcc

SEQ ID NO: 217 - DNA, 41 bp, Homo sapiens
cagaatacaaaagtgggatgsgaggcaaggagtcccgttag

SEQ ID NO: 218 - DNA, 41 bp, Homo sapiens
ctcgaggtggagcttagcccygtgccaggagcaatgggact

SEQ ID NO: 219 - DNA, 41 bp, Homo sapiens
ggagtcagtcttcacttgcamtgggggaacagatgctaata

SEQ ID NO: 220 - DNA, 41 bp, Homo sapiens
ttatccagtaaggtggctccrtcacctcttttcctggtggg

SEQ ID NO: 221 - DNA, 41 bp, Homo sapiens
gacggccaggtccggatggtkgtgggagctgctgggggcac

SEQ ID NO: 222 - DNA, 41 bp, Homo sapiens
aggaggttgtaggggcttggmctgaattttgttccttgact

SEQ ID NO: 223 - DNA, 41 bp, Homo sapiens
gggaaggaggaaaggaaagarggggagggtggttctgctta

SEQ ID NO: 224 - DNA, 41 bp, Homo sapiens
taacaccggacgcccagcagmagtcccagcttcttagaatc

SEQ ID NO: 225 - DNA, 41 bp, Homo sapiens
agcaggccccagccctgcccrctactcacctgggccccacc

SEQ ID NO: 226 - DNA, 41 bp, Homo sapiens
tttctgttgcaccacggaccstcattctgtaaccgggatac

SEQ ID NO: 227 - DNA, 41 bp, Homo sapiens
gtaaccgggataccagccagrgatggggagcgggaggcgca

SEQ ID NO: 228 - DNA, 41 bp, Homo sapiens
tcctgcggctcctactggggmgtgcgctggtcggaaggtga

SEQ ID NO: 229 - DNA, 41 bp, Homo sapiens
tcactcaaatagagctgagtyagtcactcagctcttggacc

SEQ ID NO: 230 - DNA, 41 bp, Homo sapiens
acaaactcacatgccaccagscatatgatgtaaacatgtaa

SEQ ID NO: 231 - DNA, 41 bp, Homo sapiens
aaagcagagggctgtgcaggygcccctgcccctaggctagg

SEQ ID NO: 232 - DNA, 41 bp, Homo sapiens
caaaggcctcatcctcagggmggccaactcttctgttttag

SEQ ID NO: 233 - DNA, 41 bp, Homo sapiens
actgcccagctttaggttcaytcttgtaagtgttgctggtg

SEQ ID NO: 234 - DNA, 41 bp, Homo sapiens
ctgcccagctttaggttcatycttgtaagtgttgctggtgt

SEQ ID NO: 235 - DNA, 41 bp, Homo sapiens
gcccagctttaggttcattcytgtaagtgttgctggtgtca

SEQ ID NO: 236 - DNA, 41 bp, Homo sapiens
ccctgcgctttgaagggatgratgtgacctctcccacattc

SEQ ID NO: 237 - DNA, 41 bp, Homo sapiens
tggtgtggcggttcactgatyccccagccttctgctcgatc

SEQ ID NO: 238 - DNA, 41 bp, Homo sapiens
atggcaggtaatgattcactrttgtggagtaagactttttt

SEQ ID NO: 239 - DNA, 41 bp, Homo sapiens
gccacgtggaagtgtataaaytatctggaattatcttgttt

SEQ ID NO: 240 - DNA, 41 bp, Homo sapiens
caccctgtttagcacctagcmccatccctggcctctgccca

SEQ ID NO: 241 - DNA, 41 bp, Homo sapiens
agtagcacccctcccccaccrgctgtgacaaaccaaaatgt

SEQ ID NO: 242 - DNA, 41 bp, Homo sapiens
ctgatttgtatgccatgaacyttgagccgagggccacagac

SEQ ID NO: 243 - DNA, 41 bp, Homo sapiens
aatgctctatttataaaaacyatctttatgttttttacttt

SEQ ID NO: 244 - DNA, 41 bp, Homo sapiens
aacgtgggcataaaccaccayctagtgccaaaaagcaggtg

SEQ ID NO: 245 - DNA, 41 bp, Homo sapiens
tgcctctgcacaccccttccygacaccagccctttctttac

SEQ ID NO: 246 - DNA, 41 bp, Homo sapiens
tcggccggccacgtggagccygctttcctcctcgcacccac

SEQ ID NO: 247 - DNA, 41 bp, Homo sapiens
tggtgttacgcacagctcctygtcccctccctgcctgccca

SEQ ID NO: 248 - DNA, 41 bp, Homo sapiens
ctgtactggttcagcgtgccrgccatcctgaagggctggat

SEQ ID NO: 249 - DNA, 41 bp, Homo sapiens
atcccaggattctacgattcyggtttgctccaggtatgtgc

SEQ ID NO: 250 - DNA, 41 bp, Homo sapiens
gtatgtgctcttggataaggwtcactatggatagttggagg

SEQ ID NO: 251 - DNA, 41 bp, Homo sapiens
atggcaaacaagggagtgggycaggtgtcaggtgacggggg

SEQ ID NO: 252 - DNA, 41 bp, Homo sapiens
ccccccttaaatcatttaacygaatggtatgtaacaggtgt

SEQ ID NO: 253 - DNA, 41 bp, Homo sapiens
gcagagtaaagggactcactsaagaagaggaacgtgggggt

SEQ ID NO: 254 - DNA, 41 bp, Homo sapiens
gaggggtatattcatgaagaktccaggaaaaggtaaagatt

SEQ ID NO: 255 - DNA, 41 bp, Homo sapiens
cggtttcatatgttactgatyatacaatgagatcctaggtg

SEQ ID NO: 256 - DNA, 41 bp, Homo sapiens
ggtttcatatgttactgatcrtacaatgagatcctaggtga

SEQ ID NO: 257 - DNA, 41 bp, Homo sapiens
catatgttactgatcatacartgagatcctaggtgaaacct

SEQ ID NO: 258 - DNA, 41 bp, Homo sapiens
aaccctgcattccccacacarcacccacaatcagccactgc

SEQ ID NO: 259 - DNA, 41 bp, Homo sapiens
gagccaccctgcctaggcctrtgcttttgctgagtcatcag

SEQ ID NO: 260 - DNA, 41 bp, Homo sapiens
gctgggggtcccagcaggaartggtgagacaaagggcgctg

SEQ ID NO: 261 - DNA, 41 bp, Homo sapiens
ctggctggcagggagacagcmcaggaaggtcctagagcttc

SEQ ID NO: 262 - DNA, 41 bp, Homo sapiens
gagaccttcacacaccctgayatctgggccttgcccgacga

SEQ ID NO: 263 - DNA, 41 bp, Homo sapiens
ctggttttcagccccagcccygccactgactggctttgtga

SEQ ID NO: 264 - DNA, 41 bp, Homo sapiens
agccccagccccgccactgastggctttgtgagtgcgggca

SEQ ID NO: 265 - DNA, 41 bp, Homo sapiens
tgtgatggtggtaagggaacrggcctggctctggcccctga

SEQ ID NO: 266 - DNA, 41 bp, Homo sapiens
catgaaggaggtgagaccacstgtgaagcttccctccatgt

SEQ ID NO: 267 - DNA, 41 bp, Homo sapiens
ggaggtgagaccacctgtgawgcttccctccatgtgacacc

SEQ ID NO: 268 - DNA, 41 bp, Homo sapiens
gaagcttccctccatgtgacwcctgggggccggcacctcac

SEQ ID NO: 269 - DNA, 41 bp, Homo sapiens
ctcacagggacccaccagggycacccagccccctcccttgg

SEQ ID NO: 270 - DNA, 41 bp, Homo sapiens
ttggcagcccccacagcaggmccggattccccatcctgcct

SEQ ID NO: 271 - DNA, 41 bp, Homo sapiens
gcagcccccacagcaggcccrgattccccatcctgccttct

SEQ ID NO: 272 - DNA, 41 bp, Homo sapiens
ctccctgccaaagggtgtgcyacccagggccacagtcatgg

SEQ ID NO: 273 - DNA, 41 bp, Homo sapiens
ttttacttttcctgaatcagyaatccgagcctccactgagg

SEQ ID NO: 274 - DNA, 41 bp, Homo sapiens
aatccgagcctccactgaggrgccctctgctgctcagaacc

SEQ ID NO: 275 - DNA, 41 bp, Homo sapiens
ccctctgctgctcagaacccsaaaagggagattcaaaagat

SEQ ID NO: 276 - DNA, 41 bp, Homo sapiens
gagtttgtggggcactccctrccagaggagaccgtggactt

SEQ ID NO: 277 - DNA, 41 bp, Homo sapiens
gctgtgagaggggctcctggrgtcactgcagagggagtgtg

SEQ ID NO: 278 - DNA, 41 bp, Homo sapiens
tgttctttcttggttctatgsatccatgctctgctccaccc

SEQ ID NO: 279 - DNA, 41 bp, Homo sapiens
tgtgggttgcactgggccagracccctggcaccttcaagac

SEQ ID NO: 280 - DNA, 41 bp, Homo sapiens
ctttccagggcctgcctatcycagctttctccttcttgcct

SEQ ID NO: 281 - DNA, 41 bp, Homo sapiens
tccagggcctgcctatcccakctttctccttcttgcctggg

SEQ ID NO: 282 - DNA, 41 bp, Homo sapiens
actgcgggcgaggagggcacraggccaggttcccaagagct

SEQ ID NO: 283 - DNA, 41 bp, Homo sapiens
ctgactggccttgtgagtgcrggcaagtcactcagcctccc

SEQ ID NO: 284 - DNA, 41 bp, Homo sapiens
gagctgatccaggacatctcycgcccgccactggagtacgt

SEQ ID NO: 285 - DNA, 41 bp, Homo sapiens
gccacccaccctctcccaggyggcagtccccaccttggcca

SEQ ID NO: 286 - DNA, 41 bp, Homo sapiens
cagcaaccctgtgtcggcacyccctgcccgcttctccagtg

SEQ ID NO: 287 - DNA, 41 bp, Homo sapiens
actggggtcccaggggtcgasgagctggctctatgggtttt

SEQ ID NO: 288 - DNA, 41 bp, Homo sapiens
gctctgagctgtgagaggggytcctggagtcactgcagagg

SEQ ID NO: 289 - DNA, 41 bp, Homo sapiens
cctccccgctccagctcctcwacttgccctgtttggagagg

SEQ ID NO: 290 - DNA, 41 bp, Homo sapiens
ccactgactcggggcttgccmaggctgccagggctggcaaa

SEQ ID NO: 291 - DNA, 41 bp, Homo sapiens
cctctcccctggaggctgctytacccgctgtgggggcgcat

SEQ ID NO: 292 - DNA, 41 bp, Homo sapiens
tcccgtagcccaggcaagttyggtgaccagagagcagcccc

SEQ ID NO: 293 - DNA, 41 bp, Homo sapiens
cctgcttctccctttacctgkctggctgtgtgaccttggac

SEQ ID NO: 294 - DNA, 41 bp, Homo sapiens
taggaatggctaagcgtgtcrttggcttctgtggccactca

SEQ ID NO: 295 - DNA, 41 bp, Homo sapiens
cattctcactgatgcagacgraagcttctgggcctgggcgt

SEQ ID NO: 296 - DNA, 41 bp, Homo sapiens
cacccttggcttttaccagcrtggaaacattttacctgaat

SEQ ID NO: 297 - DNA, 41 bp, Homo sapiens
gcgtgggcttctggagggagygagaggagagtggagggccc

SEQ ID NO: 298 - DNA, 41 bp, Homo sapiens
agcttgaaatgagccagactytcctgggacctgttgacccc

SEQ ID NO: 299 - DNA, 41 bp, Homo sapiens
agtactttgttttatcctccycatcctcacaactttgccat

SEQ ID NO: 300 - DNA, 41 bp, Homo sapiens
gccaggatcccttgagagacracatgaacacagccaggagc

SEQ ID NO: 301 - DNA, 41 bp, Homo sapiens
tgcttcgggctgggcttggcrggggcagctgtgctccaggc

SEQ ID NO: 302 - DNA, 41 bp, Homo sapiens
caaactggggcccttaatgcygcacaccagagcctcctttc

SEQ ID NO: 303 - DNA, 41 bp, Homo sapiens
ctctcacacaagggcggagcstcttccccttgaggcagagc

SEQ ID NO: 304 - DNA, 41 bp, Homo sapiens
agacagaggctggggccaagycagggttgccggagcttcct

SEQ ID NO: 305 - DNA, 41 bp, Homo sapiens
gccaagccagggttgccggakcttcctggactggtcaggcc

SEQ ID NO: 306 - DNA, 41 bp, Homo sapiens
ttttcctcttagagcttcccrtcgtgctctgtgtcgagggc

SEQ ID NO: 307 - DNA, 41 bp, Homo sapiens
caggcggggagcctgaatgcygcagtcgtgagggtggccag

SEQ ID NO: 308 - DNA, 41 bp, Homo sapiens
tcataaaataatgatatcagyacactttttggaaatttgag

SEQ ID NO: 309 - DNA, 41 bp, Homo sapiens
ctctgtgcccggtgttgagamaggccatgccctagagtcct

SEQ ID NO: 310 - DNA, 41 bp, Homo sapiens
gccatgccctagagtcctggrgagttccaccccagaacagc

SEQ ID NO: 311 - DNA, 41 bp, Homo sapiens
gaaccatctgggagtcgttcygtactgccgtgccgagggcc

SEQ ID NO: 312 - DNA, 41 bp, Homo sapiens
agccatagtagctagccagcratcagcgctgggaggggagc

SEQ ID NO: 313 - DNA, 41 bp, Homo sapiens
actccacttcccctgaacccyaccccttccttcctcctctg

SEQ ID NO: 314 - DNA, 41 bp, Homo sapiens
gcgtgccgaaggcgggagggytgggatggctcaagacgtga

SEQ ID NO: 315 - DNA, 41 bp, Homo sapiens
ccagctgactcccacaccagyggtcagagaacattgtcttt

SEQ ID NO: 316 - DNA, 41 bp, Homo sapiens
acattgtcttttaaggtttcygaagtgctgcaataaagaaa

SEQ ID NO: 317 - DNA, 41 bp, Homo sapiens
tctgatctcagagagctgacratggaaagaattctaaacga

SEQ ID NO: 318 - DNA, 41 bp, Homo sapiens
agaccggtgcctgcagtttakcccacagctcagccctccct

SEQ ID NO: 319 - DNA, 41 bp, Homo sapiens
ggaagggccagggctgcctgygatgcccagagcagtgcact

SEQ ID NO: 320 - DNA, 41 bp, Homo sapiens
agatcatactcgctcctgggrtgtttattaaacacctgcca

SEQ ID NO: 321 - DNA, 41 bp, Homo sapiens
gttcccggcgttgcgtcgagsgtttctgcttgtgggggtag

SEQ ID NO: 322 - DNA, 41 bp, Homo sapiens
tccaaagcctgtcttcctgakttcctgtggaaggagagtcc

SEQ ID NO: 323 - DNA, 41 bp, Homo sapiens
acccgccaccatgcccagctmattttttttgtatttttttt

SEQ ID NO: 324 - DNA, 41 bp, Homo sapiens
agaaaagcagattaatgtaasagtgacgcttagacaacaag

SEQ ID NO: 325 - DNA, 41 bp, Homo sapiens
ggcagaaagagaatatagcarctattaaacacaaataaatt

SEQ ID NO: 326 - DNA, 41 bp, Homo sapiens
tattgctgtccacctggtcartgtgtcctgctgataagtgc

SEQ ID NO: 327 - DNA, 41 bp, Homo sapiens
aatacaatacttattctgtayaattctagagggcccagaga

SEQ ID NO: 328 - DNA, 41 bp, Homo sapiens
tagaacaagtgaatattttaygttcttagtggtttatggtt

SEQ ID NO: 329 - DNA, 41 bp, Homo sapiens
tacgttcttagtggtttatgkttggcagttttcccccaaca

SEQ ID NO: 330 - DNA, 41 bp, Homo sapiens
tcaagacatttaataatgcayatgtttcagctaaccctttt

SEQ ID NO: 331 - DNA, 41 bp, Homo sapiens
ttatagtgggtttaagcatgrtttctaaaaaatttaaataa

SEQ ID NO: 332 - DNA, 41 bp, Homo sapiens
aaaacattagaactgggaagrttaaaaaatctttagtcttt

SEQ ID NO: 333 - DNA, 41 bp, Homo sapiens
tatgtgcaccctaataacatrtttccttaaaactagtacta

SEQ ID NO: 334 - DNA, 41 bp, Homo sapiens
ttggaaggtaacttaatgtargtgcctgaaaaacagggata

SEQ ID NO: 335 - DNA, 41 bp, Homo sapiens
gaatggggatttccctcagtsctgcccactggctgctcttg

SEQ ID NO: 336 - DNA, 41 bp, Homo sapiens
acctgttgccttaaactcacrcctgctttgtttttccaggt

SEQ ID NO: 337 - DNA, 41 bp, Homo sapiens
tgctggggaagaaagatcagsgtctgggacttgttgatttt

SEQ ID NO: 338 - DNA, 41 bp, Homo sapiens
agcagggcacgtcaccctccyggcacacccatgtgttcacc

SEQ ID NO: 339 - DNA, 41 bp, Homo sapiens
ttgttattttcattatgaacyatgaaatatttcagctgaaa

SEQ ID NO: 340 - DNA, 41 bp, Homo sapiens
gttgtctgtacatgttctaakgttttgtagaacacgtgtgc

SEQ ID NO: 341 - DNA, 41 bp, Homo sapiens
acggtgcttggcctgcattaycattttgtagtgaagtttct

SEQ ID NO: 342 - DNA, 41 bp, Homo sapiens
tcacctatcatcctcactgcraggatgccaggatacctccc

SEQ ID NO: 343 - DNA, 41 bp, Homo sapiens
cttaagccatcgtgcaggtcrttgctgtcttctgctcactt

SEQ ID NO: 344 - DNA, 41 bp, Homo sapiens
cccaggctggagtgtagtggygtgatctcggctcactgcaa

SEQ ID NO: 345 - DNA, 41 bp, Homo sapiens
ggagtgtagtggtgtgatctyggctcactgcaacctccgcc

SEQ ID NO: 346 - DNA, 41 bp, Homo sapiens
ctcggctcactgcaacctccrcctcccgggttcaagcagtt

SEQ ID NO: 347 - DNA, 41 bp, Homo sapiens
aatgttcagtctctcaattcytggtcatctgatttgttcct

SEQ ID NO: 348 - DNA, 41 bp, Homo sapiens
taaataaataaactattggtycctttcttgtcttataaggt

SEQ ID NO: 349 - DNA, 41 bp, Homo sapiens
tactgcagcctgatacttctyggcttaagccatcctctcac

SEQ ID NO: 350 - DNA, 41 bp, Homo sapiens
caccccaggctcctgagtagytaggactgcaggtgcacgcc

SEQ ID NO: 351 - DNA, 41 bp, Homo sapiens
cccaggctggtctagaactcstggccgtaagggatgcccct

SEQ ID NO: 352 - DNA, 41 bp, Homo sapiens
gttgatggccttatttatacrtttccattacagcttctagt

SEQ ID NO: 353 - DNA, 41 bp, Homo sapiens
caaatatttgaaaatgggacscaggcctgaggaagagcttt

SEQ ID NO: 354 - DNA, 41 bp, Homo sapiens
taagctcagcatttctgagcrtgtgctgattttaggaaata

SEQ ID NO: 355 - DNA, 41 bp, Homo sapiens
gcgtgtgctgattttaggaartaaacagttatcgtattgaa

SEQ ID NO: 356 - DNA, 41 bp, Homo sapiens
gattcaacgtacataccagcygacattgacaggtgaatggc

SEQ ID NO: 357 - DNA, 41 bp, Homo sapiens
gtctccttaaaaggtggctckctgcccctggcttgccccag

SEQ ID NO: 358 - DNA, 41 bp, Homo sapiens
aagaccagcctgaccaaaacrgtgaaaccccgtctctacta

SEQ ID NO: 359 - DNA, 41 bp, Homo sapiens
tgggaggcagaggtcgcagtragctgagatcacgccgttgc

SEQ ID NO: 360 - DNA, 41 bp, Homo sapiens
ggacttcactgggggttcccrctgcttctgggtggccccgg

SEQ ID NO: 361 - DNA, 41 bp, Homo sapiens
gtttgtctgacactggggacrgggcaggaagcaccactatg

SEQ ID NO: 362 - DNA, 41 bp, Homo sapiens
aaagggatttttttgaacttsgtaattcaaagatttaagat

SEQ ID NO: 363 - DNA, 41 bp, Homo sapiens
tcctgggtacagagttggccktgaacaaacatgagtccttc

SEQ ID NO: 364 - DNA, 41 bp, Homo sapiens
cttccccactttcagatctcygcaaatgacttcattgccaa

SEQ ID NO: 365 - DNA, 41 bp, Homo sapiens
cgcttcgatgcggactatgcrgagaagatggcaggctgcag

SEQ ID NO: 366 - DNA, 41 bp, Homo sapiens
agagctccccagagaggactrtgaggctgcatgatgcatga

SEQ ID NO: 367 - DNA, 41 bp, Homo sapiens
gagtgagacccccatctctayaaaattttttttaaaaagta

SEQ ID NO: 368 - DNA, 41 bp, Homo sapiens
atgcctaagtttacagtagcyaggcaggaaaggcacaacca

SEQ ID NO: 369 - DNA, 41 bp, Homo sapiens
ccagagcctgaggttggtgcwggggcccctccatggctgcc

SEQ ID NO: 370 - DNA, 41 bp, Homo sapiens
ctatctctccagtgcctctcygtccctgtctggaccctgct

SEQ ID NO: 371 - DNA, 41 bp, Homo sapiens
ctgtccctgtctggaccctgmtggggggccacagagcaggc

SEQ ID NO: 372 - DNA, 41 bp, Homo sapiens
tcactagtttcctgctgctgrtgtactcctatgccgtgccc

SEQ ID NO: 373 - DNA, 41 bp, Homo sapiens
tcgtctgaggtcaggagttcragaccagcctggccaacatg

SEQ ID NO: 374 - DNA, 41 bp, Homo sapiens
ttttgtcctataaaatggcartttcatgtggcccaagctga

SEQ ID NO: 375 - DNA, 41 bp, Homo sapiens
gaggcagtgatccgggccaayggctcggcgggggagtgcca

SEQ ID NO: 376 - DNA, 41 bp, Homo sapiens
gcaaatttttggtatttttaktacagtcagggttttaccat

SEQ ID NO: 377 - DNA, 41 bp, Homo sapiens
gcagatctcactttctggcarattccctgaatttgctcccc

SEQ ID NO: 378 - DNA, 41 bp, Homo sapiens
ttcatagggcttttccctcayttgttttgtaattttgtata

SEQ ID NO: 379 - DNA, 41 bp, Homo sapiens
gaaaagagactagaggcaggrgagctttgcagttcttctaa

SEQ ID NO: 380 - DNA, 41 bp, Homo sapiens
tggctggcaggaaggtgaggsagtcctctcttctctggtcc

SEQ ID NO: 381 - DNA, 41 bp, Homo sapiens
acatgaaggcaggatccagaytgaatgtttggagggaacta

SEQ ID NO: 382 - DNA, 41 bp, Homo sapiens
ggctcacgcctgtaatcccascactttgggaggccgaggcg

SEQ ID NO: 383 - DNA, 41 bp, Homo sapiens
cactttgggaggccgaggcgsgtggatcacaaagtcaggag

SEQ ID NO: 384 - DNA, 41 bp, Homo sapiens
tcctgttaactcacagagaayggaagggctggaacgggacc

SEQ ID NO: 385 - DNA, 41 bp, Homo sapiens
acactaatggccttacacgasatggaggattttacatttga

SEQ ID NO: 386 - DNA, 41 bp, Homo sapiens
gtagacttgtttatttattcmttcccaatctaggcccttat

SEQ ID NO: 387 - DNA, 41 bp, Homo sapiens
gagtgtgtgagctagaaaggkgatcctgagtctgatttggg

SEQ ID NO: 388 - DNA, 41 bp, Homo sapiens
gggctactatcagcagccacyacctcaggaaggatgacttc

SEQ ID NO: 389 - DNA, 41 bp, Homo sapiens
aagacttggaagcaaatagakaaaaaaaaaatcgtagaaat

SEQ ID NO: 390 - DNA, 41 bp, Homo sapiens
caaaatctccaaacaccctaraaggaaagaatcttttcttt

SEQ ID NO: 391 - DNA, 41 bp, Homo sapiens
ctgccttctttaatggaacaytctcacttctcttcaggaat

SEQ ID NO: 392 - DNA, 41 bp, Homo sapiens
ctttgtgtttactttgttttyacttggtacaaaagtgttgt

SEQ ID NO: 393 - DNA, 41 bp, Homo sapiens
tctgctcctagagatggaggmgtcccacagccacagtgatg

SEQ ID NO: 394 - DNA, 41 bp, Homo sapiens
agctactgaacctctcccacrtaactgtatttcaggggcag

SEQ ID NO: 395 - DNA, 41 bp, Homo sapiens
acttgtccataaaatcattaycattctaaataaagttaata

SEQ ID NO: 396 - DNA, 41 bp, Homo sapiens
aacatttaaatagtcatttayagcaatgcacaggtataata

SEQ ID NO: 397 - DNA, 41 bp, Homo sapiens
attacataatgctcaaaaatrtcttgaaaaactggttggca

SEQ ID NO: 398 - DNA, 41 bp, Homo sapiens
gtacttgacattaaaaaatayctgatgtttatatatccata

SEQ ID NO: 399 - DNA, 41 bp, Homo sapiens
ttaaaaaatatctgatgtttrtatatccataaatagctaat

SEQ ID NO: 400 - DNA, 41 bp, Homo sapiens
tttaagattgtcctcatattsttacttcctttggttactaa

SEQ ID NO: 401 - DNA, 41 bp, Homo sapiens
aatgtttatgaaaatagactyttatctggttttagtggcct

SEQ ID NO: 402 - DNA, 41 bp, Homo sapiens
ctgcatcatgctgtaaaaggrttgatatttgctttccaact

SEQ ID NO: 403 - DNA, 41 bp, Homo sapiens
taatagaatccaaaggaggamatcaagaagatcattagatt

SEQ ID NO: 404 - DNA, 41 bp, Homo sapiens
aatacattacttccatttaartagtctgtttattgtggctt

SEQ ID NO: 405 - DNA, 41 bp, Homo sapiens
agatgtaaaaaattattcaawttttaaaagcctgaaaaatt

SEQ ID NO: 406 - DNA, 41 bp, Homo sapiens
tttaaagtgtctaaatcacamatctgaagaaataagagatt

SEQ ID NO: 407 - DNA, 41 bp, Homo sapiens
tcagatcccagttttgttcckttgattctgagtttccaaat

SEQ ID NO: 408 - DNA, 41 bp, Homo sapiens
tttgacccaggacactgtgtkccactgctgtctaccgagtt

SEQ ID NO: 409 - DNA, 41 bp, Homo sapiens
gtagttcagattttggaaatmttttttctatatcataccta

SEQ ID NO: 410 - DNA, 41 bp, Homo sapiens
agccggacagtccgccgggcrgtgatccgggggccgctccc

SEQ ID NO: 411 - DNA, 41 bp, Homo sapiens
gcgctggggaccagccgccgygcccgcctcggagtcgcggc

SEQ ID NO: 412 - DNA, 41 bp, Homo sapiens
aggagtgaaacacatctttgwattctaaaggcagaaaccaa

SEQ ID NO: 413 - DNA, 41 bp, Homo sapiens
gcagagaccaatgttttggtsctgaggctggttcagaaaaa

SEQ ID NO: 414 - DNA, 41 bp, Homo sapiens
tactgaaacattctgcagaaygttatactatgagaagaaat

SEQ ID NO: 415 - DNA, 41 bp, Homo sapiens
ggactgggctctgtacacacytcgtcttactgtgtgtaaat

SEQ ID NO: 416 - DNA, 41 bp, Homo sapiens
caaaaccctcttaatattctrtttctatctgtctcagaact

SEQ ID NO: 417 - DNA, 41 bp, Homo sapiens
tctgtctcagaactgattgcrtgactctaggatcgctatat

SEQ ID NO: 418 - DNA, 41 bp, Homo sapiens
agctggaaattacaggcacaygccaccacacccagctaatt

SEQ ID NO: 419 - DNA, 41 bp, Homo sapiens
aggcatgagccacggcgcccrgccaatttatcagctttaat

SEQ ID NO: 420 - DNA, 41 bp, Homo sapiens
ttccttgttaaaagttaccasggttggccaggcacggtggt

SEQ ID NO: 421 - DNA, 41 bp, Homo sapiens
gttaccagggttggccaggcrcggtggttcatgcctgtaat

SEQ ID NO: 422 - DNA, 41 bp, Homo sapiens
ttagccaggcgcattggctcrtgtctgtaatcccagcactt

SEQ ID NO: 423 - DNA, 41 bp, Homo sapiens
ttctcccctctcctcaccatycgcacacaggtgatctacat

SEQ ID NO: 424 - DNA, 41 bp, Homo sapiens
gagggcatccagctctggggrctggacctgggggtttgtgg

SEQ ID NO: 425 - DNA, 41 bp, Homo sapiens
ttccacgctccttccttggcygagtgccctccctccgctga

SEQ ID NO: 426 - DNA, 41 bp, Homo sapiens
cctgcagaagggggtcccttycatgtccaagcagtaatggc

SEQ ID NO: 427 - DNA, 41 bp, Homo sapiens
taatggctgcagcatggagcrttgtgggggcattgagacag

SEQ ID NO: 428 - DNA, 41 bp, Homo sapiens
ccctcttctccaggggtctgyggcgactggaagaaccactt

SEQ ID NO: 429 - DNA, 41 bp, Homo sapiens
atgaagccttgtgccatctcrctgtgtcgtgccagcacctg

SEQ ID NO: 430 - DNA, 41 bp, Homo sapiens
ctgccagagagaaacaggaarggaggaagagccacacaatt

SEQ ID NO: 431 - DNA, 41 bp, Homo sapiens
caggaaatgatttggagaagkactggtgccattgttggcac

SEQ ID NO: 432 - DNA, 41 bp, Homo sapiens
ggcctcttaggtttcagccamgacaggtgactcttagcacc

SEQ ID NO: 433 - DNA, 41 bp, Homo sapiens
caacgtaagagcgcttctcawtgtccagctcctttgtttct

SEQ ID NO: 434 - DNA, 41 bp, Homo sapiens
aatcccagcactttgggaggmggagatgtgcggatggatca

SEQ ID NO: 435 - DNA, 41 bp, Homo sapiens
gactgtatgtctgctattcayataggaacaaataattcatg

SEQ ID NO: 436 - DNA, 41 bp, Homo sapiens
aaatgaaaccaacaccaacastgcagagaagcaaacaaaag

SEQ ID NO: 437 - DNA, 41 bp, Homo sapiens
aagcagctaaattgtgttccrtacaggtgcaattaggcagg

SEQ ID NO: 438 - DNA, 41 bp, Homo sapiens
atggtaaagttcgcctgggtrcagtatgtcagcatcctgct

SEQ ID NO: 439 - DNA, 41 bp, Homo sapiens
gcacttatcctagaaaggccrtttctgaagactcagcagga

SEQ ID NO: 440 - DNA, 41 bp, Homo sapiens
ctggctcccgccggccacccygggaccgcagccacgtctga

SEQ ID NO: 441 - DNA, 41 bp, Homo sapiens
gtagccccaggacacccccakcctcaacatcccattctggg

SEQ ID NO: 442 - DNA, 41 bp, Homo sapiens
ggagcttccagtggcttggtyacccccgactcttcgtccat

SEQ ID NO: 443 - DNA, 41 bp, Homo sapiens
gcagggtcctgcactctgcarggggcaatcacaggtgggag

SEQ ID NO: 444 - DNA, 41 bp, Homo sapiens
agcactggaaaaagtacagtygcacttgtagcggaggtggg

SEQ ID NO: 445 - DNA, 41 bp, Homo sapiens
ctcctgtccccgcattgaggsgaaggagcagaggtgagatc

SEQ ID NO: 446 - DNA, 41 bp, Homo sapiens
gccccaggtctcatagctccscattggcagtgctgggattt

SEQ ID NO: 447 - DNA, 41 bp, Homo sapiens
cactgggcagtaattggggcrtgggatgggcatgagggccc

SEQ ID NO: 448 - DNA, 41 bp, Homo sapiens
gtgttttggcgacttgaagayctccctagttcgcgggagta

SEQ ID NO: 449 - DNA, 41 bp, Homo sapiens
acctgagcagaaaattctctycttcgctgaaatgaaaattg

SEQ ID NO: 450 - DNA, 41 bp, Homo sapiens
aagaatttgtaaacatcacargcaacttgcagttatattcg

SEQ ID NO: 451 - DNA, 41 bp, Homo sapiens
ctataactatttcaaacataygaaacaggcataattggatt

SEQ ID NO: 452 - DNA, 41 bp, Homo sapiens
atttagaatattcatttaccmagaaatccaaatataacctg

SEQ ID NO: 453 - DNA, 41 bp, Homo sapiens
ctatccagtgacaagaggaamcaagaacctcagttcagggg

SEQ ID NO: 454 - DNA, 41 bp, Homo sapiens
agtgggcggaggcgagaagcrtcagtgttcattcctttgct

SEQ ID NO: 455 - DNA, 41 bp, Homo sapiens
gctacatcttgtcagccagtyagaattttaaacacagccag

SEQ ID NO: 456 - DNA, 41 bp, Homo sapiens
acggaaatatttgtgctgatwcttactgactgaaatcacct

SEQ ID NO: 457 - DNA, 41 bp, Homo sapiens
catggcctccgttccttcatrttacagaggtgtgaggggag

SEQ ID NO: 458 - DNA, 41 bp, Homo sapiens
cacagtggccttatgccttgyagcagggcgcctctcaggct

SEQ ID NO: 459 - DNA, 41 bp, Homo sapiens
tcctttgatgtatcaagtttygtgctgaatgttttcagtgt

SEQ ID NO: 460 - DNA, 41 bp, Homo sapiens
ttacacctggagaggagcacygcagcggtccttaatactgc

SEQ ID NO: 461 - DNA, 41 bp, Homo sapiens
agaagcacattcctgaggaaytgaaggtgggcacagccagg

SEQ ID NO: 462 - DNA, 41 bp, Homo sapiens
cctgatcattccctagctggratgaggggtgcactctggaa

SEQ ID NO: 463 - DNA, 41 bp, Homo sapiens
tctggaaggcctctcacttcstaacccccattctggatcta

SEQ ID NO: 464 - DNA, 41 bp, Homo sapiens
gattgttctaaatggtgtgtrtgggtctactgaatgtccac

SEQ ID NO: 465 - DNA, 41 bp, Homo sapiens
acctgaagggactggtggccktccagacaggcctgtttttg

SEQ ID NO: 466 - DNA, 41 bp, Homo sapiens
ataattatgggctctgcttaygaaatttagcttcagacagg

SEQ ID NO: 467 - DNA, 41 bp, Homo sapiens
tgctgcccacagagtcggtgrtcactcctggccactgtttg

SEQ ID NO: 468 - DNA, 41 bp, Homo sapiens
ccaggagcattttcttccatygaggagatccccgaaaacgt

SEQ ID NO: 469 - DNA, 41 bp, Homo sapiens
ctgagttctgtacttggcagrttgatcggaggaccacagag

SEQ ID NO: 470 - DNA, 41 bp, Homo sapiens
catgaaggtgacatcattttrttaatagaaattagcaggca

SEQ ID NO: 471 - DNA, 41 bp, Homo sapiens
aggaggaaccggacagagacscgggggatccagtttgaaga

SEQ ID NO: 472 - DNA, 41 bp, Homo sapiens
gagaccctggaggacgatgcyccatacatcttaaaagaggc

SEQ ID NO: 473 - DNA, 41 bp, Homo sapiens
tcaaatatctttattagaccyggggctaaccaggtgaagat

SEQ ID NO: 474 - DNA, 41 bp, Homo sapiens
ccacacccctcctttgaggaygcccggggtctcccacaggc

SEQ ID NO: 475 - DNA, 41 bp, Homo sapiens
ggaagcatcacacagcgttargagccgtttccttcaggtgt

SEQ ID NO: 476 - DNA, 41 bp, Homo sapiens
tgaggttctcctggctagtcrgggtggcttcacccatcact

SEQ ID NO: 477 - DNA, 41 bp, Homo sapiens
gcaagggggctgctgaaatcscagagacttttgcagcatca

SEQ ID NO: 478 - DNA, 41 bp, Homo sapiens
gggtggtgtggtgtccagggrtccatctttccagaatccat

SEQ ID NO: 479 - DNA, 41 bp, Homo sapiens
aggggaggctttttctacctragaaggggagtgtctttgag

SEQ ID NO: 480 - DNA, 41 bp, Homo sapiens
tccagcagtgcggcttcctgkcaacaaggtaggccctggtg

SEQ ID NO: 481 - DNA, 41 bp, Homo sapiens
ccagcagtgcggcttcctggyaacaaggtaggccctggtgc

SEQ ID NO: 482 - DNA, 41 bp, Homo sapiens
cacacgaaggtgtgcactcayggcctgcagggcacccaggt

SEQ ID NO: 483 - DNA, 41 bp, Homo sapiens
gcatgctttgctcatctggamtctccagaagcagggaacag

SEQ ID NO: 484 - DNA, 41 bp, Homo sapiens
gccgagaccctcagcaggatrgtgcagttacagggctgagc

SEQ ID NO: 485 - DNA, 41 bp, Homo sapiens
caggtttctaaaataataatygaaaggtgagtgatgtttac

SEQ ID NO: 486 - DNA, 41 bp, Homo sapiens
taaaattttcaggtctgcttragagttaaaggcaaagagtt

SEQ ID NO: 487 - DNA, 41 bp, Homo sapiens
ccttcttccccaacccctgayggcagacttgggaatttgaa

SEQ ID NO: 488 - DNA, 41 bp, Homo sapiens
tgcagcttaagatctgccttrgtatttgaagagatataaac

SEQ ID NO: 489 - DNA, 41 bp, Homo sapiens
aaatatagaatgaaaattatrtattacaaagctcttaaaaa

SEQ ID NO: 490 - DNA, 41 bp, Homo sapiens
caatgagaaaataaagcaagsagggtagaaggaggtagaat

SEQ ID NO: 491 - DNA, 41 bp, Homo sapiens
tctaagaaagtagggactatragaacccctatgtatctata

SEQ ID NO: 492 - DNA, 41 bp, Homo sapiens
ctatgagaacccctatgtatytatatccaccatagtattct

SEQ ID NO: 493 - DNA, 41 bp, Homo sapiens
aaaaggcaggttggaagatgmaggaggggagtatgcagaaa

SEQ ID NO: 494 - DNA, 41 bp, Homo sapiens
taaccatcttgcttaaccttrtcatttttagccaagtcatt

SEQ ID NO: 495 - DNA, 41 bp, Homo sapiens
aaatgatacatattcaggaartcaaaaatctctgacttaga

SEQ ID NO: 496 - DNA, 41 bp, Homo sapiens
aaatctctgacttagataccyggcaataataatcaaatgta

SEQ ID NO: 497 - DNA, 41 bp, Homo sapiens
aattttgaaagaaattgaagktctgtggtttttatttatca

SEQ ID NO: 498 - DNA, 41 bp, Homo sapiens
taggtatgtaggagggtcccsttatatacatagttgttaat

SEQ ID NO: 499 - DNA, 41 bp, Homo sapiens
tctattccatgaccacaattkttacctgtaacttgaatagt

SEQ ID NO: 500 - DNA, 41 bp, Homo sapiens
cctaggacccaacatgagacrtaatataccatcagtaaaat

SEQ ID NO: 501 - DNA, 41 bp, Homo sapiens
ggtgtccattccctcaagaakttatactttgtgttacacac

SEQ ID NO: 502 - DNA, 41 bp, Homo sapiens
agtaacaggctagtagataayataaataactgaggccaacg

SEQ ID NO: 503 - DNA, 41 bp, Homo sapiens
tacatgaacttagagaatcargtagatcacacacaccaaca

SEQ ID NO: 504 - DNA, 41 bp, Homo sapiens
cacaccaacaataaaattacrcagaatgataaaagaatttg

SEQ ID NO: 505 - DNA, 41 bp, Homo sapiens
ttctgatcatgtagtaacaaytataaagaaaataataatgt

SEQ ID NO: 506 - DNA, 41 bp, Homo sapiens
aggcaaagcagaaccttttgmctcacacaacattatattat

SEQ ID NO: 507 - DNA, 41 bp, Homo sapiens
agattttattcctctctcttyttgagttgaagaaataagtt

SEQ ID NO: 508 - DNA, 41 bp, Homo sapiens
cacctttcaagggtaagtggmaaaaaatagaaattcaaata

SEQ ID NO: 509 - DNA, 41 bp, Homo sapiens
aatcttgctctttgaaccatwctgtcagtgagagtcaggga

SEQ ID NO: 510 - DNA, 41 bp, Homo sapiens
tgttacagaggacttaaaacrgttgtcttgcttgcaaacgg

SEQ ID NO: 511 - DNA, 41 bp, Homo sapiens
cagcctcccaagtagctaggrctacagacatgtgcaaccat

SEQ ID NO: 512 - DNA, 41 bp, Homo sapiens
atcatgtgtggaactggaatygggtgttattcaagcaaaaa

SEQ ID NO: 513 - DNA, 41 bp, Homo sapiens
acatttgcggtaaagcgatartttattccaagctaatcatg

SEQ ID NO: 514 - DNA, 41 bp, Homo sapiens
aaatggaggctacatggctamggctgaatgagcatgacctt

SEQ ID NO: 515 - DNA, 41 bp, Homo sapiens
tacaacttggaggatgcattkaggctgcagaatatatgttt

SEQ ID NO: 516 - DNA, 41 bp, Homo sapiens
gtctagcagaaaatgaaaagrtggaaggatgagaaaaatta

SEQ ID NO: 517 - DNA, 41 bp, Homo sapiens
ctattttttaaagcgtgcatycttacataagacttaaatat

SEQ ID NO: 518 - DNA, 41 bp, Homo sapiens
aaggcaatgagagacgaaagkgcttgcacaaggtcaccgcg

SEQ ID NO: 519 - DNA, 41 bp, Homo sapiens
atgtattgtacccttcaaccrttatgtaccgagtatctact

SEQ ID NO: 520 - DNA, 41 bp, Homo sapiens
acaattgacaaggcaagattytgaaaacaaatcaaaaataa

SEQ ID NO: 521 - DNA, 41 bp, Homo sapiens
tgagagaagagaagcaggaasttgagagaggaggaagagag

SEQ ID NO: 522 - DNA, 41 bp, Homo sapiens
tatgcattcttctatattatrcaagacaaaaattttaggat

SEQ ID NO: 523 - DNA, 41 bp, Homo sapiens
acactcagggaacatgccttrgttcaccatcacaagattag

SEQ ID NO: 524 - DNA, 41 bp, Homo sapiens
ctgcttgaaaaatgagtaagyttctgatgctttctttgcac

SEQ ID NO: 525 - DNA, 41 bp, Homo sapiens
agcaccttctcccagtacacrgtggtggatgagaatgcagt

SEQ ID NO: 526 - DNA, 41 bp, Homo sapiens
ttcgtttgaagtcatcggtcrgcttgacaccatggtatgat

SEQ ID NO: 527 - DNA, 41 bp, Homo sapiens
tgaaactggacttgaaagtamaaatgagacaaaaatttatg

SEQ ID NO: 528 - DNA, 41 bp, Homo sapiens
taacccctatactgtattgcrtcactttctaacaggcagct

SEQ ID NO: 529 - DNA, 41 bp, Homo sapiens
gtctgtgtggttgttggggtrttgcctgccagtgttcaact

SEQ ID NO: 530 - DNA, 41 bp, Homo sapiens
gttgagaaacactgcctagtmccgtctgtggtcctagaatt

SEQ ID NO: 531 - DNA, 41 bp, Homo sapiens
ctatcacagaataatccgcayagaacactaagcagattacg

SEQ ID NO: 532 - DNA, 41 bp, Homo sapiens
tgtgcagacacagaaagtttyacttaactttctacacctaa

SEQ ID NO: 533 - DNA, 41 bp, Homo sapiens
tcagtagcatgtgctgcactygctgcagtagttcaatggga

SEQ ID NO: 534 - DNA, 41 bp, Homo sapiens
aacctcaacctttagaaggcraaccttacggtgtttataaa

SEQ ID NO: 535 - DNA, 41 bp, Homo sapiens
tgaattgaattaattaatacrtgtatttgatgtatcaaaca

SEQ ID NO: 536 - DNA, 41 bp, Homo sapiens
tggcatagcgtaaagagactwggaaaaatggaataaagcca

SEQ ID NO: 537 - DNA, 41 bp, Homo sapiens
aagtctaaccatatcaccaayttagtatgccattgtactat

SEQ ID NO: 538 - DNA, 41 bp, Homo sapiens
gctgctatttatttcaagtargccacaaaatttccttattt

SEQ ID NO: 539 - DNA, 41 bp, Homo sapiens
catttttagatgaagaccaakgttgtgaaagcaaataaata

SEQ ID NO: 540 - DNA, 41 bp, Homo sapiens
tctccacatttggtctagccyacaggatcatcatattatga

SEQ ID NO: 541 - DNA, 41 bp, Homo sapiens
tccctcatctcattgcccacrctcattgctttaattcagtc

SEQ ID NO: 542 - DNA, 41 bp, Homo sapiens
atttacattttgtaaggctayaattgtatcttttaagaaaa

SEQ ID NO: 543 - DNA, 41 bp, Homo sapiens
gatatagtaaatgcatctccyagagtaatattcacttaaca

SEQ ID NO: 544 - DNA, 41 bp, Homo sapiens
aaacacttgttatgagttaasttggattacattttgaaatc

SEQ ID NO: 545 - DNA, 41 bp, Homo sapiens
aatataaacatagagctagartcatattatcatacttatca

SEQ ID NO: 546 - DNA, 41 bp, Homo sapiens
tacatcaaaagaaataaatcyaagaaggaataaacacattt

SEQ ID NO: 547 - DNA, 41 bp, Homo sapiens
tcagcactctgtgtctagctwaaggtttgtaaatgcaccaa

SEQ ID NO: 548 - DNA, 41 bp, Homo sapiens
gaacccatcaattccgtacamattttggtgactttgaagag

SEQ ID NO: 549 - DNA, 41 bp, Homo sapiens
aaatttaccctaaccagcctsactctctgccactttctgtt

SEQ ID NO: 550 - DNA, 41 bp, Homo sapiens
ttgtgtgccacgtggggaagrctgaggaccgggagcagctg

SEQ ID NO: 551 - DNA, 41 bp, Homo sapiens
tgtctcagttcacaggatcaygactctttttctcgaaactg

SEQ ID NO: 552 - DNA, 41 bp, Homo sapiens
ggctttgtgtgtgctccattrtctgaactgggcctgctggg

SEQ ID NO: 553 - DNA, 41 bp, Homo sapiens
tttgacttccttacatgggtractgtgtgagtcactctgtt

SEQ ID NO: 554 - DNA, 41 bp, Homo sapiens
gcattgggtcatgtgtatgtstgagtggggctgaatgtaag

SEQ ID NO: 555 - DNA, 41 bp, Homo sapiens
cagggatgaaggagcagagcygctgagaggccacacaggtg

SEQ ID NO: 556 - DNA, 41 bp, Homo sapiens
tttccctggggttttcccttygcattccatcctccctgagc

SEQ ID NO: 557 - DNA, 41 bp, Homo sapiens
agcgacgttatgaaattcccmacacttcacatttctataat

SEQ ID NO: 558 - DNA, 41 bp, Homo sapiens
ctccttagccccccagagggycccaactttaagagcatact

SEQ ID NO: 559 - DNA, 41 bp, Homo sapiens
aggggtgcaggatggggtgtkagctggagggcagggggtag

SEQ ID NO: 560 - DNA, 41 bp, Homo sapiens
ccccccacataagaggtgggsttgtccaagactccgaggga

SEQ ID NO: 561 - DNA, 41 bp, Homo sapiens
cgcccagctccagggaggccwctgaagacagaggtcagcca

SEQ ID NO: 562 - DNA, 41 bp, Homo sapiens
cagccggccgtgcgccgggcygcgctcatgtgcgaggacgc

SEQ ID NO: 563 - DNA, 41 bp, Homo sapiens
ccgtcggtctgctcggccccsctccctcggggctgggcagg

SEQ ID NO: 564 - DNA, 41 bp, Homo sapiens
gctcctcagcatctgctcacrccagggacccacacctctct

SEQ ID NO: 565 - DNA, 41 bp, Homo sapiens
aaggctccatcctgagacaamaagtccagtgtgacctgccc

SEQ ID NO: 566 - DNA, 41 bp, Homo sapiens
aggaggaagacctgtatcccrgggacaccctcctccactcc

SEQ ID NO: 567 - DNA, 41 bp, Homo sapiens
cctccaggctgctaggcagayggcctcctctaaagcccagc

SEQ ID NO: 568 - DNA, 41 bp, Homo sapiens
tgaccagccctgccacccgakgagccttgggcagaaccctg

SEQ ID NO: 569 - DNA, 41 bp, Homo sapiens
actaccatggaggcccccacracagagcgctgccccttgac

SEQ ID NO: 570 - DNA, 41 bp, Homo sapiens
aataataataataataataawaaatgtattttaaagatggc

SEQ ID NO: 571 - DNA, 41 bp, Homo sapiens
cgtgcccaaacctggtgatgratcccttactatttagaata

SEQ ID NO: 572 - DNA, 41 bp, Homo sapiens
ccatccatactttgccacaaragaaggaacatgagctttat

SEQ ID NO: 573 - DNA, 41 bp, Homo sapiens
gatttgaaatcctgtggacayggggtgaattacttttaaaa

SEQ ID NO: 574 - DNA, 41 bp, Homo sapiens
attttctgtttgtaaattccrgtatcagggctatagtttaa

SEQ ID NO: 575 - DNA, 41 bp, Homo sapiens
actattctccctcttcgactygtgatgactataataatctt

SEQ ID NO: 576 - DNA, 41 bp, Homo sapiens
tacctattgaagtaagcctaygtcatatccacctatttgtt

SEQ ID NO: 577 - DNA, 41 bp, Homo sapiens
ccactgattcccagagctagktcattaagaagacagtgcct

SEQ ID NO: 578 - DNA, 41 bp, Homo sapiens
cagattactggagggctactrtttgctcaccaatgcaaatg

SEQ ID NO: 579 - DNA, 41 bp, Homo sapiens
gggatatttgtctcctttctscccagtgcatgttggaaacc

SEQ ID NO: 580 - DNA, 41 bp, Homo sapiens
  misc_feature (21)..(21): a is present or absent.
atatatattccaattaaaaaacaaaataaatttccgaaact

SEQ ID NO: 581 - DNA, 41 bp, Homo sapiens
caacaaagagattttttaaarctttttaaaacaccagacag

SEQ ID NO: 582 - DNA, 41 bp, Homo sapiens
cagcactattcgcaatagcaragatgtggaatcaatctaaa

SEQ ID NO: 583 - DNA, 41 bp, Homo sapiens
agcagaaaaaataaataatgygtactaggcttactacctgc

SEQ ID NO: 584 - DNA, 41 bp, Homo sapiens
caaaacaaacccccatgacaygagtttatctatataacaaa

SEQ ID NO: 585 - DNA, 41 bp, Homo sapiens
ataagattaatatctgcatamaaatctttgtttacagcttg

SEQ ID NO: 586 - DNA, 41 bp, Homo sapiens
tgtttacagcttgttatataytgaattatgtctgctccccc

SEQ ID NO: 587 - DNA, 41 bp, Homo sapiens
ttaatctgataggattggtgsctttataagaaaaagaaaag

SEQ ID NO: 588 - DNA, 41 bp, Homo sapiens
ttgctctctccccagtgcagktaccaaggaaaggccatgtg

SEQ ID NO: 589 - DNA, 41 bp, Homo sapiens
tcaattggctttatctgcgaytctggaatcaggcaatactc

SEQ ID NO: 590 - DNA, 41 bp, Homo sapiens
gcgattctggaatcaggcaayactccatttcataaaacaga

SEQ ID NO: 591 - DNA, 41 bp, Homo sapiens
cctcagcttgcacttggcctrctaattcttatataatccaa

SEQ ID NO: 592 - DNA, 41 bp, Homo sapiens
agcctgcctgctggcagtgasccatcatccaccattctcac

SEQ ID NO: 593 - DNA, 41 bp, Homo sapiens
gacataaggttctctctatcwgcatgtatggtttgccttgt

SEQ ID NO: 594 - DNA, 41 bp, Homo sapiens
gactgcgtgaccaggtggaaytagcctcagcatggaagggt

SEQ ID NO: 595 - DNA, 41 bp, Homo sapiens
gttggtgtagtttatactagrttatgaatgatagccttaat

SEQ ID NO: 596 - DNA, 41 bp, Homo sapiens
tgccaagttgcagggtggggsaggactcacaatagtgcatc

SEQ ID NO: 597 - DNA, 41 bp, Homo sapiens
atagagccttacctgaagaarggtgtgcagtatgcatggtt

SEQ ID NO: 598 - DNA, 41 bp, Homo sapiens
ctgttcagggaggatcccggrttccaacatggttctttatt

SEQ ID NO: 599 - DNA, 41 bp, Homo sapiens
gcctccgtctcacaccaacargcagatttccccaccacggc

SEQ ID NO: 600 - DNA, 41 bp, Homo sapiens
gagggaagattgtgcagcccyatcactgtgtcggggcccag

SEQ ID NO: 601 - DNA, 41 bp, Homo sapiens
ttttcagggcctgtccctccratgggggcaggcttctccca

SEQ ID NO: 602 - DNA, 41 bp, Homo sapiens
gtcttgggacagaggagttgrgggagttgaaattaggccct

SEQ ID NO: 603 - DNA, 41 bp, Homo sapiens
gtcatttctgatggggtcatyagggaaatgggattgagcgc

SEQ ID NO: 604 - DNA, 41 bp, Homo sapiens
tgtgtggtagaagcagcattytaagcactacgtgaattaac

SEQ ID NO: 605 - DNA, 41 bp, Homo sapiens
gctttcatgcaggattgatcstagtgggatgtattaggaag

SEQ ID NO: 606 - DNA, 41 bp, Homo sapiens
ttttgggaacacctgtctagrtgttaagagccagtggaata

SEQ ID NO: 607 - DNA, 41 bp, Homo sapiens
taaacttgttttattgtttayatgttactctgaacattgaa

SEQ ID NO: 608 - DNA, 41 bp, Homo sapiens
taaaattagtatctctctctrtaagttcattatttaagata

SEQ ID NO: 609 - DNA, 41 bp, Homo sapiens
tagaaaaatgtgtatcacacygtaagtgttcagtaatgtta

SEQ ID NO: 610 - DNA, 41 bp, Homo sapiens
ctttatctagatattatagtmcctcattttacttttaaact

SEQ ID NO: 611 - DNA, 41 bp, Homo sapiens
gtaaagagattaaacacacaygcacacatacatatacctat

SEQ ID NO: 612 - DNA, 41 bp, Homo sapiens
agaaaacctgagaaatgacayaatttatttaaagccatagt

SEQ ID NO: 613 - DNA, 41 bp, Homo sapiens
gccagtaattacatgtagccrtttacatcaaattagctaat

SEQ ID NO: 614 - DNA, 41 bp, Homo sapiens
taatgaaagtaaatgtttcarcttccctaacaaaagttgaa

SEQ ID NO: 615 - DNA, 41 bp, Homo sapiens
aaatgtcagaaattttttgtrccgtcagtcatcaacaagaa

SEQ ID NO: 616 - DNA, 41 bp, Homo sapiens
aaggagcatacagaaaacttsccatgatggggcctttgtgg

SEQ ID NO: 617 - DNA, 41 bp, Homo sapiens
tctaatagtccccagtattartggtgcacatcttcatgtcc

SEQ ID NO: 618 - DNA, 41 bp, Homo sapiens
tcttttttcatctctgttaayatcaaccatacagttaaaca

SEQ ID NO: 619 - DNA, 41 bp, Homo sapiens
ttagtattggaactaaacttytctagtgttgagaactttgg

SEQ ID NO: 620 - DNA, 41 bp, Homo sapiens
aaattctaactaattaaaggkttcatcctttagtaactaga

SEQ ID NO: 621 - DNA, 41 bp, Homo sapiens
tataaagttgtggttaatgartatatatgaataagaatatt

SEQ ID NO: 622 - DNA, 41 bp, Homo sapiens
agaaggaaaaaggccattttsttaagaatccctgagatatg

SEQ ID NO: 623 - DNA, 41 bp, Homo sapiens
atagaaggagaggctatactrcctccttaagtctcaggacc

SEQ ID NO: 624 - DNA, 41 bp, Homo sapiens
actaaggataaaaatatggcrtactcagtcacattggaact

SEQ ID NO: 625 - DNA, 41 bp, Homo sapiens
aggccttaatgacatatttcycctcacataaagatacaaca

SEQ ID NO: 626 - DNA, 41 bp, Homo sapiens
taatgacatatttcccctcamataaagatacaacatgcttt

SEQ ID NO: 627 - DNA, 41 bp, Homo sapiens
tatggtaactgaagaaaatgrcattaagttcctaaagttat

SEQ ID NO: 628 - DNA, 41 bp, Homo sapiens
attctgttaagaagttcttayattaagaaatattgtctcct

SEQ ID NO: 629 - DNA, 41 bp, Homo sapiens
gagaatataggagcttctgcrtatgcctgaaagtcagtcag

SEQ ID NO: 630 - DNA, 41 bp, Homo sapiens
attactcatttaatgaataartggattactgagcactgtct

SEQ ID NO: 631 - DNA, 41 bp, Homo sapiens
actgctgtccaggggtccatytggggctgagcccagctgga

SEQ ID NO: 632 - DNA, 41 bp, Homo sapiens
ctgtcctcttgttcgggaggygtggcagcttttcccttact

SEQ ID NO: 633 - DNA, 41 bp, Homo sapiens
aactatgaactagctgtggcyctctcccgctgggtgttcaa

SEQ ID NO: 634 - DNA, 41 bp, Homo sapiens
  misc_feature (21)..(21): a is present or absent.
tcctgcccaagaatgctgccaaaaaacggccccaggcctca

SEQ ID NO: 635 - DNA, 41 bp, Homo sapiens
tctggaccctgaacaggaggsgacatcgtgacaaagcaaat

SEQ ID NO: 636 - DNA, 41 bp, Homo sapiens
atcagcaggcgatggttactstgggcgggtaaatcaggtga

SEQ ID NO: 637 - DNA, 41 bp, Homo sapiens
gtaaagggaaagggcgttccwcaactgagaagtgaagattc

SEQ ID NO: 638 - DNA, 41 bp, Homo sapiens
attatttgctctacctcaggrtttttcgggtcaagcgagat

SEQ ID NO: 639 - DNA, 41 bp, Homo sapiens
ctcatcaggtgtgtgtcagakggcttggtgctggccagtct

SEQ ID NO: 640 - DNA, 41 bp, Homo sapiens
attgtaatagattaacaaagktgatgaaagtagtgtacata

SEQ ID NO: 641 - DNA, 41 bp, Homo sapiens
tgtaatagattaacaaagttkatgaaagtagtgtacataat

SEQ ID NO: 642 - DNA, 41 bp, Homo sapiens
gtgtacataatgtacatagtrtagttgaacacatagcaagc

SEQ ID NO: 643 - DNA, 41 bp, Homo sapiens
gatggctatatgaccaataawgatacatataaatgtataga

SEQ ID NO: 644 - DNA, 41 bp, Homo sapiens
agaaagattgcagctgatagrtgtcaggctaataaggacac

SEQ ID NO: 645 - DNA, 41 bp, Homo sapiens
aatggcagaggactggaaatktacattttaagctttaccct

SEQ ID NO: 646 - DNA, 41 bp, Homo sapiens
gccttcctcttcagcacattyccaattatacttccaattcc

SEQ ID NO: 647 - DNA, 41 bp, Homo sapiens
atttcaatttttttttttggrgggggagacagagtctcact

SEQ ID NO: 648 - DNA, 41 bp, Homo sapiens
aattacctcccaaaggcctcwtatcccagatactatcacat

SEQ ID NO: 649 - DNA, 41 bp, Homo sapiens
ttctcaaatttcattatacastattcttcaacccaaagttt

SEQ ID NO: 650 - DNA, 41 bp, Homo sapiens
tttaactatagatgccttctkctcctcttgtgtttgattta

SEQ ID NO: 651 - DNA, 41 bp, Homo sapiens
tcactgcagcctcaacctctygggctcaggtgatcctccaa

SEQ ID NO: 652 - DNA, 41 bp, Homo sapiens
aaaaaaatttgtagatatggktactccctatgttgcccagg

SEQ ID NO: 653 - DNA, 41 bp, Homo sapiens
ctccctatgttgcccaggctratcttgaattcttgggctca

SEQ ID NO: 654 - DNA, 41 bp, Homo sapiens
gtcagacaatggccttcagcrtcctctctttgcagaatatg

SEQ ID NO: 655 - DNA, 41 bp, Homo sapiens
ttttggagacacttttcagasagagcgtttccagcatcttc

SEQ ID NO: 656 - DNA, 41 bp, Homo sapiens
  misc_feature (21)..(21): a is present or absent.
tccctttccatttttaagttagacttttttttttcacctct

SEQ ID NO: 657 - DNA, 41 bp, Homo sapiens
atacacatatggaacaattamctaaaaacttaaggtaatat

SEQ ID NO: 658 - DNA, 41 bp, Homo sapiens
  misc_feature (21)..(21): c is present or absent.
gggtttatagtgttccccccctccccgcccccaaaagaccc

SEQ ID NO: 659 - DNA, 41 bp, Homo sapiens
ccattctatttgtcaactgcrtaacacaggcgtagaagtgg

SEQ ID NO: 660 - DNA, 41 bp, Homo sapiens
aaatgtctgtccttttggcaygttgtgaaggagaacactaa

SEQ ID NO: 661 - DNA, 41 bp, Homo sapiens
attggaggtgacgatatctcygtgatgctgggggagaaatc

SEQ ID NO: 662 - DNA, 41 bp, Homo sapiens
attgctatagaagagagtaaygtaaagcagaaatagttttc

SEQ ID NO: 663 - DNA, 41 bp, Homo sapiens
tttgaaattagtgtctttaayagttatctttttccacagag

SEQ ID NO: 664 - DNA, 41 bp, Homo sapiens
aagaattctgtacttccaatktataatgaatactttcttag

SEQ ID NO: 665 - DNA, 41 bp, Homo sapiens
tctgtgtgcatgaacatgcaygcgtgcacgcgcacacacac

SEQ ID NO: 666 - DNA, 41 bp, Homo sapiens
tatgtggagcaatttgaaaawagtatattctaagccattaa

SEQ ID NO: 667 - DNA, 41 bp, Homo sapiens
ggatcactgctaaagatcccrgagtcactccatgtcccagt

SEQ ID NO: 668 - DNA, 41 bp, Homo sapiens
ggagaaggggaccgcatgcaragggtggcaggcagggaggg

SEQ ID NO: 669 - DNA, 41 bp, Homo sapiens
gggtaaacccattttgaataytagcattgccaatatcctgt

SEQ ID NO: 670 - DNA, 41 bp, Homo sapiens
aaagaaaatcatacaactcarcatccagttggctttttaag

SEQ ID NO: 671 - DNA, 41 bp, Homo sapiens
  misc_feature (21)..(21): a is present or absent.
tcagcttcctcctttgccaaaccaagagatgagctggcctg

SEQ ID NO: 672 - DNA, 41 bp, Homo sapiens
  misc_feature (21)..(21): g is present or absent.
tgacctctccctgttagtgtgggggcagctctttccagtgt

SEQ ID NO: 673 - DNA, 41 bp, Homo sapiens
  misc_feature (21)..(21): c is present or absent.
gcccttaaagggaagttcatccttctctgccttccaggctc

SEQ ID NO: 674 - DNA, 45 bp, Homo sapiens
tccgcgaggatacagcggcccctgycagacaatatgttagccgtg

SEQ ID NO: 675 - DNA, 41 bp, Homo sapiens; identical to SEQ ID NO: 520

SEQ ID NO: 676 - DNA, 43 bp, Homo sapiens
  misc_feature (21)..(23): gaa is present or absent.
actgcatagaaatttaagaagaacttgttttattcctctccag

SEQ ID NO: 677 - DNA, 42 bp, Homo sapiens
  misc_feature (21)..(22): ag is present or absent.
gttaatgctttcccactctcaggggaaggatttgcattttga

SEQ ID NO: 678 - DNA, 41 bp, Homo sapiens
taactgctgtaaagttacacrgggaagccctttcccgacaa

SEQ ID NO: 679 - DNA, 41 bp, Homo sapiens
aactgctgtaaagttacacgrggaagccctttcccgacaaa

SEQ ID NO: 680 - DNA, 41 bp, Homo sapiens
ttcagatccctgtaagccagrtattatttttaccattttta

SEQ ID NO: 681 - DNA, 41 bp, Homo sapiens
tacgaagtggctaatttacayagtacttagccagatgaccg

SEQ ID NO: 682 - DNA, 41 bp, Homo sapiens
gatgaccgaaggactcagtayccgagggcccctaacagaaa

SEQ ID NO: 683 - DNA, 41 bp, Homo sapiens
gaccgaaggactcagtacccragggcccctaacagaaaaca

SEQ ID NO: 684 - DNA, 41 bp, Homo sapiens
ccgaaggactcagtacccgarggcccctaacagaaaacaca

SEQ ID NO: 685 - DNA, 41 bp, Homo sapiens
tagaggggagactaagccctsggagtagctttcggatcaga

SEQ ID NO: 686 - DNA, 41 bp, Homo sapiens
taagccctgggagtagctttsggatcagaggaagtcctgct

SEQ ID NO: 687 - DNA, 41 bp, Homo sapiens
aattaaattcccaggttgggrccaccactttttagtctgac

SEQ ID NO: 688 - DNA, 41 bp, Homo sapiens
gcggagagaaggctgagggayaccgcgggcagggaggagaa

SEQ ID NO: 689 - DNA, 41 bp, Homo sapiens
cggagagaaggctgagggacwccgcgggcagggaggagaag

SEQ ID NO: 690 - DNA, 41 bp, Homo sapiens
gagaaggctgagggacaccgygggcagggaggagaagggag

SEQ ID NO: 691 - DNA, 41 bp, Homo sapiens
agggagaagagctttgctccrttaggatctggctggtgtct

SEQ ID NO: 692 - DNA, 41 bp, Homo sapiens
tgctggagctgcaggctgtcycttccctgagccccggtgag

SEQ ID NO: 693 - DNA, 41 bp, Homo sapiens
agtgagtgcccggtctcctcyctgctcttgcttatgggaag

SEQ ID NO: 694 - DNA, 41 bp, Homo sapiens
tgtgggtggctgcaatgtgtrgggggaaggtggcctcctcc

SEQ ID NO: 695 - DNA, 41 bp, Homo sapiens
actatcagcagttattctcaygactccaatgtcatgtcaac

SEQ ID NO: 696 - DNA, 41 bp, Homo sapiens
ctgccaccccattagaaggarctttctactttccctgagct

SEQ ID NO: 697 - DNA, 41 bp, Homo sapiens
gctggtctggatccagaggcwgccaggtgcttgggcgctcc

SEQ ID NO: 698 - DNA, 41 bp, Homo sapiens
caccgtatatttgagcccaastgcttggacgccttcccaaa

SEQ ID NO: 699 - DNA, 41 bp, Homo sapiens
tttgagcccaagtgcttggaygccttcccaaatctgaagga

SEQ ID NO: 700 - DNA, 41 bp, Homo sapiens
cagcaccgtgtagaatcttcrtaagtgttagctgttactgt

SEQ ID NO: 701 - DNA, 41 bp, Homo sapiens
atttgctcctggccatctacycagactgtctgtctgtctgt

SEQ ID NO: 702 - DNA, 41 bp, Homo sapiens
ggaacatccgcggggtgagcsagggtccgctgggcggtggg

SEQ ID NO: 703 - DNA, 41 bp, Homo sapiens
gggacgggggtgcgtgggggyggggaagtgtggagcagctg

SEQ ID NO: 704 - DNA, 41 bp, Homo sapiens
gactgcatctcctctccccascttagaggtgttaagatcag

SEQ ID NO: 705 - DNA, 41 bp, Homo sapiens
agcaggccctggtctcctctytgcccttgcatatgggaagg

SEQ ID NO: 706 - DNA, 41 bp, Homo sapiens
ttgattccttctggtgagttmttggtcttgctgactctaag

SEQ ID NO: 707 - DNA, 41 bp, Homo sapiens
tcctcttggtgggttcatggyctggctggcttcaggagtga

SEQ ID NO: 708 - DNA, 41 bp, Homo sapiens
acctttagctagacacagagygctgatttgtgcatttacaa

SEQ ID NO: 709 - DNA, 41 bp, Homo sapiens
ttgtgcatttacaatcctttrgctaggcagaaaagttctcc

SEQ ID NO: 710 - DNA, 41 bp, Homo sapiens
ctcagccccgagctgtccccrtgttgcatgaaggagcagca

SEQ ID NO: 711 - DNA, 41 bp, Homo sapiens
ttctgctgggcatagtaaggygcttgagaattcttgctccc

SEQ ID NO: 712 - DNA, 41 bp, Homo sapiens; identical to SEQ ID NO: 195

SEQ ID NO: 713 - DNA, 41 bp, Homo sapiens
agcctaacttctataccttgraggcactgtctacaaaaaaa

SEQ ID NO: 714 - DNA, 41 bp, Homo sapiens
ctgttggactgggtggggtckttataagattggtgtatttt

SEQ ID NO: 715 - DNA, 41 bp, Homo sapiens
cccagtggggcaacaagcctrtatgctgagcaggaggcaga

SEQ ID NO: 716 - DNA, 41 bp, Homo sapiens
ttggctggattggggtgctaygctcagagtgagtctgtgtt

SEQ ID NO: 717 - DNA, 41 bp, Homo sapiens
gatgctttcccagtcctggakctgcataaagaataacttgc

SEQ ID NO: 718 - DNA, 41 bp, Homo sapiens
gctttcccagtcctggatctrcataaagaataacttgcatt

SEQ ID NO: 719 - DNA, 41 bp, Homo sapiens
agcagggcccaccagccgacmgcctcgaagcgccgtgagcc

SEQ ID NO: 720 - DNA, 41 bp, Homo sapiens
tgtctgaccagccgccccgcyaaggagtcacaagagggcag

SEQ ID NO: 721 - DNA, 41 bp, Homo sapiens
aaaatactgcatcaaaaccargccacgctctgttgggggga

SEQ ID NO: 722 - DNA, 41 bp, Homo sapiens
ctgcatcaaaaccaggccacrctctgttggggggacaccaa

SEQ ID NO: 723 - DNA, 41 bp, Homo sapiens
tctcccaacactgctctccaragccccttggcaaccatgtt

SEQ ID NO: 724 - DNA, 41 bp, Homo sapiens
caccactgtttaaggccctgsgggggcagagttaaacacaa

SEQ ID NO: 725 - DNA, 41 bp, Homo sapiens
ccttgaaaggcatcgactacragacggtgcccatcaatctc

SEQ ID NO: 726 - DNA, 41 bp, Homo sapiens
agaaggaggagtttgctggcyctgtcccctctggtccaggg

SEQ ID NO: 727 - DNA, 41 bp, Homo sapiens
tatctgaaccagcctcccagrctgctttgggcctgacagtt

SEQ ID NO: 728 - DNA, 41 bp, Homo sapiens
ctcccccgggctccagcaaasttttctttgttcgctgcagt

SEQ ID NO: 729 - DNA, 41 bp, Homo sapiens
ccccgggcctccttcctgttycccgcctctcccgccatgcc

SEQ ID NO: 730 - DNA, 41 bp, Homo sapiens
gtgtgtgcgcgtgcgtgtgcrtgtgtgtgcgtgtgtgtgtg

SEQ ID NO: 731 - DNA, 41 bp, Homo sapiens
cccgctggctgagtccctagyccccctgccctgcagatctc

SEQ ID NO: 732 - DNA, 41 bp, Homo sapiens
taaagagtgtcccaggcgtcygtgccgcccaatggggcaca

SEQ ID NO: 733 - DNA, 41 bp, Homo sapiens
tgctgccgctgccgtggggcrgggcgtgggcggtgctggct

SEQ ID NO: 734 - DNA, 41 bp, Homo sapiens
agtgtctgtgagagaagcagrttctggagggtggagtgtgg

SEQ ID NO: 735 - DNA, 41 bp, Homo sapiens
ggggttatacagagcccctcsgcccccaccacacatatgca

SEQ ID NO: 736 - DNA, 41 bp, Homo sapiens
gtatggcaggagtggggtccyggcaagccatagaggtatgg

SEQ ID NO: 737 - DNA, 41 bp, Homo sapiens
cgccacctgtgaccagcagckgatgcctccttggccaccag

SEQ ID NO: 738 - DNA, 41 bp, Homo sapiens
ggtcagcattcaaagtcaagwagcgccatttatcttcccgt

SEQ ID NO: 739 - DNA, 41 bp, Homo sapiens
ggtcacccatgccgcctgctmccctccttcccaggggcaag

SEQ ID NO: 740 - DNA, 41 bp, Homo sapiens
tcccaggggcaagcagagacygagaacattccagagattag

SEQ ID NO: 741 - DNA, 41 bp, Homo sapiens
ttacaagtgttccaaaggaawcgtgcctgcttctaaacctg

SEQ ID NO: 742 - DNA, 41 bp, Homo sapiens
cctcgtgatttgcccacctcrgcctcccaaagtgctgggat

SEQ ID NO: 743 - DNA, 41 bp, Homo sapiens
aggccgaggtgggcggatcaygaggtcaggagatcgagacc

SEQ ID NO: 744 - DNA, 41 bp, Homo sapiens
tgtttattccttgcatagccrtaatataaagtatgaatttt

SEQ ID NO: 745 - DNA, 41 bp, Homo sapiens
actgtgttctaatgatgactrtgatgcttaaacgattaagg

SEQ ID NO: 746 - DNA, 41 bp, Homo sapiens
atcagagtgctatgttgcagrtatatgaactttggcttcat

SEQ ID NO: 747 - DNA, 41 bp, Homo sapiens
acaaaaaggccctaacagcgmtaaatccattcacttcggga

SEQ ID NO: 748 - DNA, 41 bp, Homo sapiens
cgcctaaaaccgctacggtgrctctgctggggacaaattat

SEQ ID NO: 749 - DNA, 41 bp, Homo sapiens
ctgggggagtagatatatgtwtttgagaatgagaggagtaa

SEQ ID NO: 750 - DNA, 41 bp, Homo sapiens
agcctttgcgcaggcactccyatatttcagcctatgcgagc

SEQ ID NO: 751 - DNA, 41 bp, Homo sapiens
agaaaatgccccttctttatstggggtggcagcacggagcc

SEQ ID NO: 752 - DNA, 41 bp, Homo sapiens
cgagtttacaagctacataayagcgtcgggggcaagtaagt

SEQ ID NO: 753 - DNA, 41 bp, Homo sapiens
aataaaattcctgagtttctstcactcgctcttacagtacc

SEQ ID NO: 754 - DNA, 41 bp, Homo sapiens
tgtaattaggcaacaggaaarttgtactatctttcaaatgc

SEQ ID NO: 755 - DNA, 41 bp, Homo sapiens
tcttccatcctcctaacatayagttagcttccactctccaa

SEQ ID NO: 756 - DNA, 41 bp, Homo sapiens
tgaatatgcaatgcaattgtsgggggatagttacttttcat

SEQ ID NO: 757 - DNA, 41 bp, Homo sapiens
cagcatgacccatctaaaccsatgttgactctcccaggcct

SEQ ID NO: 758 - DNA, 41 bp, Homo sapiens
cttgcctttttgttgtggggkgtggggtggtcacagagaag

SEQ ID NO: 759 - DNA, 41 bp, Homo sapiens
gtgcagagaagaaaacaaagyggggaaggtggaaaggggat

SEQ ID NO: 760 - DNA, 41 bp, Homo sapiens
tcacagatattttattttccygactgaaactaacttaattc

SEQ ID NO: 761 - DNA, 41 bp, Homo sapiens
acttaattctacctaatttgsgtggggagtagttggccaaa

SEQ ID NO: 762 - DNA, 41 bp, Homo sapiens
ggagtagttggccaaatcatsaaattgttaactttttgcta

SEQ ID NO: 763 - DNA, 41 bp, Homo sapiens
aacatattgtgtaatcaaccytaggtgttaaaaaaggtttg

SEQ ID NO: 764 - DNA, 41 bp, Homo sapiens
atcccagcactttgggaggcsaaggcaggcagattgcttga

SEQ ID NO: 765 - DNA, 41 bp, Homo sapiens
aaaaaatacaaaaattagccrgatgtggtggtgcacacctg

SEQ ID NO: 766 - DNA, 41 bp, Homo sapiens
tggtggtgcacacctgtagtyccagctacttgggaggctga

SEQ ID NO: 767 - DNA, 41 bp, Homo sapiens
tcttatgctactatatttttyttcttgggaatttgagaaaa

SEQ ID NO: 768 - DNA, 41 bp, Homo sapiens
atgacttacctttatttccakttacattttttttctaaata

SEQ ID NO: 769 - DNA, 41 bp, Homo sapiens
agtctgattgtggtgatgtakgtatagtcatgccacagtga

SEQ ID NO: 770 - DNA, 41 bp, Homo sapiens
ttgcaaaaagagcaaaatctmggtgaaatgtattgtgtaaa

SEQ ID NO: 771 - DNA, 41 bp, Homo sapiens
gagacacaggctttcctaagmtatgacaacaccataactag

SEQ ID NO: 772 - DNA, 41 bp, Homo sapiens
aaaggcacccactggaggtgmattattttgccatcacctga

SEQ ID NO: 773 - DNA, 41 bp, Homo sapiens
gaagagtgttgtcatgaaggyggagtcactgcccaagggag

SEQ ID NO: 774 - DNA, 41 bp, Homo sapiens
ttatcccatatgtgcccacartgagccggtctgagcagagc

SEQ ID NO: 775 - DNA, 41 bp, Homo sapiens
ctttcttatgcatttgcaaamcaatgattctgtctgctgtg

SEQ ID NO: 776 - DNA, 41 bp, Homo sapiens
gcattggtggaaggtgggctyggatcgtccccgggcctggc

SEQ ID NO: 777 - DNA, 41 bp, Homo sapiens
ggaaatcacttcttattcaayagttccataaaagctggccg

SEQ ID NO: 778 - DNA, 41 bp, Homo sapiens
acaccacatttactttatgtsttacatagttagtgagatca

SEQ ID NO: 779 - DNA, 41 bp, Homo sapiens
cacacttgtgcacatgcagayacccatgggcatccaagagt

SEQ ID NO: 780 - DNA, 41 bp, Homo sapiens
cagatgtgattttactccaarccattttagctctagaagag

SEQ ID NO: 781 - DNA, 41 bp, Homo sapiens
tgagctctgagagcaaatgaragatgttagcaccctaaaca

SEQ ID NO: 782 - DNA, 41 bp, Homo sapiens
taaacatcaccccaaaggatwcctaccattctccttctgag

SEQ ID NO: 783 - DNA, 41 bp, Homo sapiens
tcttcgtagtatctaataccytttttgttagccttaaagtt

SEQ ID NO: 784 - DNA, 41 bp, Homo sapiens
taataacaaccgaatgtctartaaatgactctcctctgagc

SEQ ID NO: 785 - DNA, 42 bp, Homo sapiens
gttgtcgaacagctgtctcatagctgacatcctccctgataa

SEQ ID NO: 786 - DNA, 40 bp, Homo sapiens
gttgtcgaacagctgtctcagctgacatcctccctgataa

SEQ ID NO: 787 - DNA, 41 bp, Homo sapiens
agggctaaaaatcctgattawacctaccttgaagcttttaa

SEQ ID NO: 788 - DNA, 41 bp, Homo sapiens
aataaaagtacatggcatatmtttgatgggaacagacttgt

SEQ ID NO: 789 - DNA, 41 bp, Homo sapiens
aactccatgtgtataaagcarcaccacagatgacacttcca

SEQ ID NO: 790 - DNA, 41 bp, Homo sapiens
ggattgtgccatcccttgatbggcaatgaccttttactttt

SEQ ID NO: 791 - DNA, 41 bp, Homo sapiens; identical to SEQ ID NO: 790

SEQ ID NO: 792 - DNA, 41 bp, Homo sapiens
aacatacaaaaattagccggrtatggtggcgggcacctgta

SEQ ID NO: 793 - DNA, 41 bp, Homo sapiens
catacaaaaattagccggatrtggtggcgggcacctgtaat

SEQ ID NO: 794 - DNA, 41 bp, Homo sapiens
ttccctgaaacaacccattgyggccatccagaatcagccaa

SEQ ID NO: 795 - DNA, 41 bp, Homo sapiens
cacagcctcatgggtcagccyactccagagggtgcattccc

SEQ ID NO: 796 - DNA, 41 bp, Homo sapiens
ggaagcaggggccctggccayagccgctggcagtaagcagg

SEQ ID NO: 797 - DNA, 44 bp, Homo sapiens
tatagtctacaaagaatgaaacacaaagatcataacaatagcta

SEQ ID NO: 798 - DNA, 40 bp, Homo sapiens
tatagtctacaaagaatgaaaaagatcataacaatagcta

SEQ ID NO: 799 - DNA, 41 bp, Homo sapiens
tccctgctgccctcccctgcrcactttatcttccctttgcc

SEQ ID NO: 800 - DNA, 41 bp, Homo sapiens
agggccccagcctggagtggstgaagaaactgtgagcacct

SEQ ID NO: 801 - DNA, 41 bp, Homo sapiens
tccttacctgcactggcaccrgctctggagccccagtccct

SEQ ID NO: 802 - DNA, 41 bp, Homo sapiens
agactctagcatggtacctgsaacataaggttccttagaaa

SEQ ID NO: 803 - DNA, 41 bp, Homo sapiens
ggcatattgctagttttctckgtctcaatttcatcatctat

SEQ ID NO: 804 - DNA, 41 bp, Homo sapiens
acaaattttgaactgttcacytaacacaggctttttctgaa

SEQ ID NO: 805 - DNA, 41 bp, Homo sapiens
aggtatctaaaaggtattgcmatttggtcattggttctttc

SEQ ID NO: 806 - DNA, 56 bp, Homo sapiens
aagtcagttttgttgtcttggatttgtggtatccagtgtaacatttaaccaaaaaa

SEQ ID NO: 807 - DNA, 40 bp, Homo sapiens
aagtcagttttgttgtcttgtgtaacatttaaccaaaaaa

SEQ ID NO: 808 - DNA, 42 bp, Homo sapiens
  misc_feature (21)..(22): ag is present or absent.
attaagtagcagttaataaaagtctagactgctgattcatac

SEQ ID NO: 809 - DNA, 42 bp, Homo sapiens
  misc_feature (21)..(22): ta is present or absent.
tataggaattttaaaatatataggatattgaaacattcagtt

SEQ ID NO: 810 - DNA, 41 bp, Homo sapiens
tttataatttatatatgttaygtgctttcttttgtatagct

SEQ ID NO: 811 - DNA, 41 bp, Homo sapiens
actaccaaggagcgcggcggrcagccggatagcaggacgct

SEQ ID NO: 812 - DNA, 41 bp, Homo sapiens
ggggagcggcgtccgccaagytacttctaccgccagcacct

SEQ ID NO: 813 - DNA, 41 bp, Homo sapiens
attcagcagtttgaaaacatratgtttgcctggcagaatac

SEQ ID NO: 814 - DNA, 41 bp, Homo sapiens
agttaaagaatctgaaaagtstcagaaatgatttaccctga

SEQ ID NO: 815 - DNA, 41 bp, Homo sapiens
ctgtaaaatggggatgctgatggtacctacctgacctatga

SEQ ID NO: 816 - DNA, 40 bp, Homo sapiens
ctgtaaaatggggatgctgaggtacctacctgacctatga

SEQ ID NO: 817 - DNA, 41 bp, Homo sapiens
accaaccaaaggtctatcaarggggtgtcctctttgcaccc

SEQ ID NO: 818 - DNA, 41 bp, Homo sapiens
aaagggaaccatcagaacccygtgatgaaatgagaatcggc

SEQ ID NO: 819 - DNA, 41 bp, Homo sapiens
gctcccggattccggctggcrggggttagggcagggtagag

SEQ ID NO: 820 - DNA, 41 bp, Homo sapiens
agaggagtcacgtgcttcggrgagagcctttataggacgtt

SEQ ID NO: 821 - DNA, 41 bp, Homo sapiens
tcacctccctcctaagccggracccttcgctctccccgaat

SEQ ID NO: 822 - DNA, 41 bp, Homo sapiens
ctccctgggaacccccagctmgtcaccccttcagcccggga

SEQ ID NO: 823 - DNA, 41 bp, Homo sapiens
cctgggaacccccagctagtsaccccttcagcccgggaccc

SEQ ID NO: 824 - DNA, 41 bp, Homo sapiens
tcctttagacccctgaaacgsagggctgacatcctgccacc

SEQ ID NO: 825 - DNA, 41 bp, Homo sapiens
gccgccgggaatctgtgcccscttccatcatcatgtcgtcg

SEQ ID NO: 826 - DNA, 41 bp, Homo sapiens
gcctccacccctggggcgcckcctccatcaccccaccctcc

SEQ ID NO: 827 - DNA, 41 bp, Homo sapiens
gggccttgtgtacgctggagrccaaaagtgggaagggagga

SEQ ID NO: 828 - DNA, 48 bp, Homo sapiens
agggtccagggtcccctgctcagaggctaacactggccgaagagaaag

SEQ ID NO: 829 - DNA, 40 bp, Homo sapiens
agggtccagggtcccctgctaacactggccgaagagaaag

SEQ ID NO: 830 - DNA, 42 bp, Homo sapiens
  misc_feature (21)..(22): ca is present or absent.
tgatagagccctgatccacccactctctgaaacttctttgct

SEQ ID NO: 831 - DNA, 42 bp, Homo sapiens
  misc_feature (21)..(22): ag is present or absent.
cattttgtgactgaggtgacaggggcccacagcggggccatg

SEQ ID NO: 832 - DNA, 41 bp, Homo sapiens
tttgtgttctctattctgacycgcatgaggtaaagctgaga

SEQ ID NO: 833 - DNA, 41 bp, Homo sapiens
caaacctagacaaagtgtgcyctttatccagaagtgagcag

SEQ ID NO: 834 - DNA, 41 bp, Homo sapiens
ttcaggagataaaaagctctrattgctcaggcctgagatgg

SEQ ID NO: 835 - DNA, 41 bp, Homo sapiens
gaagttgtcttgtaagtgagrtaagaatatgtactcacata

SEQ ID NO: 836 - DNA, 41 bp, Homo sapiens
tcattgttttgcaaagagatkcccctaacccagctttcttt

SEQ ID NO: 837 - DNA, 41 bp, Homo sapiens
gaggagacaccaggaggcgcrttgatggttacagattcctc

SEQ ID NO: 838 - DNA, 41 bp, Homo sapiens
tttatttctggaccaagtaargatgggtccgtggcccacac

SEQ ID NO: 839 - DNA, 41 bp, Homo sapiens
gtcatacaaggggagcctccrggatagaagtgcagaaactt

SEQ ID NO: 840 - DNA, 41 bp, Homo sapiens
attcttttttcactactaggytgtttcctccacatctgact

SEQ ID NO: 841 - DNA, 41 bp, Homo sapiens
aaagaaaaagcactgtgtgawctgccatggccgcttctgca

SEQ ID NO: 842 - DNA, 41 bp, Homo sapiens
gattctctaatgaaaaataakacttttttttgcattttttt

SEQ ID NO: 843 - DNA, 47 bp, Homo sapiens
ggtcattgtgcatgatacttaagtaaaaaaaaactaagctgtgtaat

SEQ ID NO: 844 - DNA, 42 bp, Homo sapiens
ggtcattgtgcatgatacttaaaaaaaactaagctgtgtaat

SEQ ID NO: 845 - DNA, 41 bp, Homo sapiens
ctcattttggaaagactctcaaccttgctgtaccaaaaatg

SEQ ID NO: 846 - DNA, 40 bp, Homo sapiens
ctcattttggaaagactctcaccttgctgtaccaaaaatg

SEQ ID NO: 847 - DNA, 41 bp, Homo sapiens
cagcaccctgtagaggcctcrggatgctgaagatgccatga

SEQ ID NO: 848 - DNA, 41 bp, Homo sapiens
gacacaggcattctgcagacrctagacaattttagtggcag

SEQ ID NO: 849 - DNA, 41 bp, Homo sapiens
gatggctctttgtagaacaakgcagattctcaaaggtgacc

SEQ ID NO: 850 - DNA, 41 bp, Homo sapiens
accacagttaaagaaaaaatyacaagccattgcgctagaga

SEQ ID NO: 851 - DNA, 41 bp, Homo sapiens
cacaccctattttggtttctsttctccacttttcccctcgt

SEQ ID NO: 852 - DNA, 41 bp, Homo sapiens
ttcccctcgttcttgtccccycttttctctctcctgggccc

SEQ ID NO: 853 - DNA, 41 bp, Homo sapiens
attcatatgagcacaatggaratgataatattacaatacca

SEQ ID NO: 854 - DNA, 41 bp, Homo sapiens
ggcttgatgttcagcctgagrcaagaattaggagtgtttag

SEQ ID NO: 855 - DNA, 41 bp, Homo sapiens
aatgtatccaaaagagattckcattcctgccatatgaagaa

SEQ ID NO: 856 - DNA, 41 bp, Homo sapiens
gacaaatataaattactaagrtcatttttaggagtgatagg

SEQ ID NO: 857 - DNA, 41 bp, Homo sapiens
aatttcttcccagaatggacyaaaggcatcctctgttccca

SEQ ID NO: 858 - DNA, 41 bp, Homo sapiens
atctctggtaatattcatacrgattatttgtaatcccttta

SEQ ID NO: 859 - DNA, 41 bp, Homo sapiens
attcctagttctttgtccctyaagtttgttggtcaccttgt

SEQ ID NO: 860 - DNA, 41 bp, Homo sapiens
agaaaatagtcatgaatggcyccaactaacactagtcttta

SEQ ID NO: 861 - DNA, 41 bp, Homo sapiens
gtcatttgattacctgagtamagtgtactgttacctgtttg

SEQ ID NO: 862 - DNA, 41 bp, Homo sapiens
attttataaattctttgatgmcttgggggtcttattcaact

SEQ ID NO: 863 - DNA, 41 bp, Homo sapiens
attgtgtagagtaatgacagyagagctgtcaacttttttaa

SEQ ID NO: 864 - DNA, 41 bp, Homo sapiens
gcagagctgtcaacttttttwaaaaaataattttagcttaa

SEQ ID NO: 865 - DNA, 41 bp, Homo sapiens
ttttttaaaaaaataattttrgcttaaaaaaattaaaaatt

SEQ ID NO: 866 - DNA, 41 bp, Homo sapiens
atcattgctgtttaaaagttyaagtagtgtgaatttcagta

SEQ ID NO: 867 - DNA, 41 bp, Homo sapiens
aaccaatccttttattttttwtcttccagaaactttgattt

SEQ ID NO: 868 - DNA, 41 bp, Homo sapiens
gggtgtgtgtgatgttttgaygttttgattgattgccttct

SEQ ID NO: 869 - DNA, 41 bp, Homo sapiens
ctttctcaccccttgcactgyagtggttttgtgccactctt

SEQ ID NO: 870 - DNA, 41 bp, Homo sapiens
gccagggaagatgcctattcmcacagtgcttatgctccttt

SEQ ID NO: 871 - DNA, 41 bp, Homo sapiens
gatttttctccttcttcaatrtaagcttcccttaaaataaa

SEQ ID NO: 872 - DNA, 41 bp, Homo sapiens
tctaaactcaaaacaggtttrtttggttattgtttaggctg

SEQ ID NO: 873 - DNA, 41 bp, Homo sapiens
tatagttttgccttttccagsatattacatatatggttaga

SEQ ID NO: 874 - DNA, 41 bp, Homo sapiens
ctttcatttcttttcatagcytgatagctcatttctttata

SEQ ID NO: 875 - DNA, 41 bp, Homo sapiens
ggattatgcgtacttggaaartacttggatagcggtgatta

SEQ ID NO: 876 - DNA, 41 bp, Homo sapiens
acattaattttgatggagtakcacaatgcctccagaggctg

SEQ ID NO: 877 - DNA, 41 bp, Homo sapiens
gcatgcaatcagttatatagyctagataagaattacaattc

SEQ ID NO: 878 - DNA, 41 bp, Homo sapiens
tcctcttgaaattgtagatakgtatctacacatttctcatc

SEQ ID NO: 879 - DNA, 41 bp, Homo sapiens
gaaaagatagatgtataaatraccaaaaattcgtgaagaaa

SEQ ID NO: 880 - DNA, 41 bp, Homo sapiens
ctacaaatatattctaaatgygtaatcatggataagtacaa

SEQ ID NO: 881 - DNA, 41 bp, Homo sapiens
tgtttttcaagcctttaaacrgctgtggaaccctgtgctca

SEQ ID NO: 882 - DNA, 41 bp, Homo sapiens
ccagctacttgggaggctgargtgggaggatcacttgagcc

SEQ ID NO: 883 - DNA, 41 bp, Homo sapiens
acagcggtctgtcttcctgcrgttctcataggctagcttac

SEQ ID NO: 884 - DNA, 41 bp, Homo sapiens
tacactaaagtgtctcttacrtttatacttgagaaagtgtt

SEQ ID NO: 885 - DNA, 41 bp, Homo sapiens
tgcagactttcaggtgggtasgatgagggattgctgctgct

SEQ ID NO: 886 - DNA, 41 bp, Homo sapiens
aaaactgagtcagaacgcccrtgctcagaaaacaggggcgt

SEQ ID NO: 887 - DNA, 41 bp, Homo sapiens
gtgccagcacttaggaattakgaccttctaatgaagttctt

SEQ ID NO: 888 - DNA, 42 bp, Homo sapiens
taaacagtaggggcaagatatcgagtggaaacagccaagatt

SEQ ID NO: 889 - DNA, 40 bp, Homo sapiens
taaacagtaggggcaagatagagtggaaacagccaagatt

SEQ ID NO: 890 - DNA, 41 bp, Homo sapiens
  misc_feature (21)..(21): t is present or absent.
tggtttctcttctccacttttcccctcgttcttgtcccccc

SEQ ID NO: 891 - DNA, 41 bp, Homo sapiens
tcctagggggtcgtcgtggtscagacagtttagcagaacag

SEQ ID NO: 892 - DNA, 41 bp, Homo sapiens
gtgttagcaatggctcacgcytctgtttgttgtccttgttt

SEQ ID NO: 893 - DNA, 41 bp, Homo sapiens
tttgttgtccttgtttgtttkgtccattgaccacgttggac

SEQ ID NO: 894 - DNA, 41 bp, Homo sapiens
acgttggacagcatttttttrttcctttaactaacgggaaa

SEQ ID NO: 895 - DNA, 41 bp, Homo sapiens
ttttgaaaagttagcccaggrttgcattgcaaataacaaaa

SEQ ID NO: 896 - DNA, 41 bp, Homo sapiens
tatctcagaatatctcaggarcatttagtagacagctatgc

SEQ ID NO: 897 - DNA, 41 bp, Homo sapiens
aagccctaaaatagatagtgkcaatgggaatgaaaacaaga

SEQ ID NO: 898 - DNA, 41 bp, Homo sapiens
ttttgaaacgaggtctcactrtgttgtccaggctgggcttg

SEQ ID NO: 899 - DNA, 41 bp, Homo sapiens
gagtgcggtggcgcgatctcratctcgggtcactgcagcct

SEQ ID NO: 900 - DNA, 41 bp, Homo sapiens
ggaggccaaggcaggcagatygcctaagtgcaggagtttga

SEQ ID NO: 901 - DNA, 41 bp, Homo sapiens
ggccaacatggcgaaaccccrtctctactaaaaatacaaaa

SEQ ID NO: 902 - DNA, 41 bp, Homo sapiens
ctgtatgtcttaattttaaaktaaatttgcattttatatat

SEQ ID NO: 903 - DNA, 41 bp, Homo sapiens
gcaccactgtttaatgctagrattcgaaagaggttggtaat

SEQ ID NO: 904 - DNA, 41 bp, Homo sapiens
attacttttagaaaacgtgtyttagctgatactcaggcata

SEQ ID NO: 905 - DNA, 41 bp, Homo sapiens
aaaaattgttatattagttayaccttggttcaaaaattgca

SEQ ID NO: 906 - DNA, 41 bp, Homo sapiens
gataaagtctcactatgttgyccaggttgatctcaaactcc

SEQ ID NO: 907 - DNA, 41 bp, Homo sapiens
ctgaaaatacaaaaattagcygggtgtggtggcatgtgcct

SEQ ID NO: 908 - DNA, 41 bp, Homo sapiens
ttacagtgagccgagatcackccactgcgctccagcctggg

SEQ ID NO: 909 - DNA, 41 bp, Homo sapiens
acacatttaattttttacatygaaaatactgcagttatggt

SEQ ID NO: 910 - DNA, 41 bp, Homo sapiens
agaaaacatgtattcagaaayaggaattcaaggttacagtg

SEQ ID NO: 911 - DNA, 41 bp, Homo sapiens
cactgtgtagcaatttatggygaattttccaaagtggcaaa

SEQ ID NO: 912 - DNA, 41 bp, Homo sapiens
tctaggataattataattaawaataatcatagtaacaatgg

SEQ ID NO: 913 - DNA, 41 bp, Homo sapiens
  misc_feature (21)..(21): t is present or absent.
aaatgtattgtctgtgcttttaacattttgtaatagtaaat

SEQ ID NO: 914 - DNA, 41 bp, Homo sapiens
tctgccacaaggagctaggaycacgctcacctcacgatttc

SEQ ID NO: 915 - DNA, 41 bp, Homo sapiens
cggggtcaggcgcagcggcgygcccagtgcagagagctcct

SEQ ID NO: 916 - DNA, 41 bp, Homo sapiens
aaagctgtgtcaaatgtactrctttagatctggactgtgaa

SEQ ID NO: 917 - DNA, 41 bp, Homo sapiens
ggtgggtgagcagtcagttcrgagctcctgatgtgggagtg

SEQ ID NO: 918 - DNA, 41 bp, Homo sapiens
aactgaatacagccctgtccwgagggcttgcaaagtgaatc

SEQ ID NO: 919 - DNA, 41 bp, Homo sapiens
gaaaaaaaatcttaatgccakggaagacgttttttaaatac

SEQ ID NO: 920 - DNA, 41 bp, Homo sapiens
attaatgggaaaatctacatstaaaattcattttattgtaa

SEQ ID NO: 921 - DNA, 41 bp, Homo sapiens
ttcattttaactaattttatktctcccattttgtgaatggg

SEQ ID NO: 922 - DNA, 41 bp, Homo sapiens
ataaaattatgatattattartactaatatagccagccata

SEQ ID NO: 923 - DNA, 41 bp, Homo sapiens
aatatatataattataggaayctcagagtagcaaccatggt

SEQ ID NO: 924 - DNA, 41 bp, Homo sapiens
cacaatataggcacaaacttmctaccaaagcactaacaagt

SEQ ID NO: 925 - DNA, 41 bp, Homo sapiens
tttactatatagatatatggwatagactatagagtatctct

SEQ ID NO: 926 - DNA, 41 bp, Homo sapiens
accaaataaggtattatgcargctcatctttttatataaga

SEQ ID NO: 927 - DNA, 41 bp, Homo sapiens
ggaaagacttgctttgccagygtatccgaaacctctgttat

SEQ ID NO: 928 - DNA, 41 bp, Homo sapiens
tcgcacagctgagaagagcarggggctggttttcagtaccc

SEQ ID NO: 929 - DNA, 41 bp, Homo sapiens
agaaaagatgagtataattcrtctaacttacccattcttaa

SEQ ID NO: 930 - DNA, 41 bp, Homo sapiens
ctactctgtgaaagtaaggtwatgttgaacaagtaaattaa

SEQ ID NO: 931 - DNA, 41 bp, Homo sapiens
actttctttggagatggagtwccagcagttgggaatgtaat

SEQ ID NO: 932 - DNA, 41 bp, Homo sapiens
  misc_feature (21)..(21): t is present or absent.
tgtgatgatttttttttttttggctgtattaaccttccatt

SEQ ID NO: 933 - DNA, 41 bp, Homo sapiens
  misc_feature (21)..(21): t is present or absent.
tttctttctctttttttttttgagatacattctcactctga

SEQ ID NO: 934 - DNA, 41 bp, Homo sapiens
ccaaacatagccagcacttcyggctgtaactccgggctgtt

SEQ ID NO: 935 - DNA, 41 bp, Homo sapiens
agtgagccgagattgcaccartgcattccagcctgggcaac

SEQ ID NO: 936 - DNA, 41 bp, Homo sapiens
gttttcaacaaaggactccakagtagtagagaagtttctgt

SEQ ID NO: 937 - DNA, 41 bp, Homo sapiens
attttcatcacacctcaactkaaggtataacagccttaaga

SEQ ID NO: 938 - DNA, 41 bp, Homo sapiens
ttcatcacacctcaacttaargtataacagccttaagaatg

SEQ ID NO: 939 - DNA, 41 bp, Homo sapiens
aacaatgtggtatagtggggsgggtggtgagcaggtgtcat

SEQ ID NO: 940 - DNA, 41 bp, Homo sapiens
cctgatgctcctggctccagrgtagaccttttccctttaga

SEQ ID NO: 941 - DNA, 41 bp, Homo sapiens
tcaccacgtgtctgtagatayaggaccgcagaccttcgctt

SEQ ID NO: 942 - DNA, 41 bp, Homo sapiens
aaatccttggcttctagaatkggtcactgatggtatataat

SEQ ID NO: 943 - DNA, 41 bp, Homo sapiens
aacctctgcctccccgattcrcgccattctcctgcctcagc

SEQ ID NO: 944 - DNA, 41 bp, Homo sapiens
agtagagacggggtttcaccrtgttagccagcatggtctcg

SEQ ID NO: 945 - DNA, 41 bp, Homo sapiens
aggcgtgagccactgcgcccrgcctagaccttcttcttata

SEQ ID NO: 946 - DNA, 41 bp, Homo sapiens
cccaacagctcccaatgtaaracagatctattaatattctg

SEQ ID NO: 947 - DNA, 41 bp, Homo sapiens
gcaacagatcttgacctataycccatagggtacagctgagg

SEQ ID NO: 948 - DNA, 41 bp, Homo sapiens
atcccatagggtacagctgasgactttaatcagaaaaggag

SEQ ID NO: 949 - DNA, 41 bp, Homo sapiens
tagccttgcttttactctacygttcctcccaaatcacaccc

SEQ ID NO: 950 - DNA, 41 bp, Homo sapiens
acaaactcttaatgcgaattytgcagatcaaagtgggctta

SEQ ID NO: 951 - DNA, 41 bp, Homo sapiens
tttaatctcctttaaatttcrcaatttcacaacctagggta

SEQ ID NO: 952 - DNA, 41 bp, Homo sapiens
tttttttttttttttgagacraagtctcactcttgtcccct

SEQ ID NO: 953 - DNA, 41 bp, Homo sapiens
ctgtagcctctgcctcccagrttcaggcgattcgcgtacct

SEQ ID NO: 954 - DNA, 41 bp, Homo sapiens
cagattcaagtggttctcctscctcagcctcccaagtagct

SEQ ID NO: 955 - DNA, 42 bp, Homo sapiens
  misc_feature (21)..(22): at is present or absent.
attataaacactaaacaaacatgtgtggtctctttagagggg

SEQ ID NO: 956 - DNA, 41 bp, Homo sapiens
  misc_feature (21)..(21): a is present or absent.
aggaacaagtgactaccctgaaaaaagaagagatgaaacaa

SEQ ID NO: 957 - DNA, 41 bp, Homo sapiens
  misc_feature (21)..(21): c is present or absent.
accagacagagttccctttacttgttttcctgtggcaaaga

SEQ ID NO: 958 - DNA, 41 bp, Homo sapiens
ggccgctgggtacaggatgcmccttcctccagccgcacctc

SEQ ID NO: 959 - DNA, 41 bp, Homo sapiens
ggatcatggtggtggagaggrgcttgtgtctggtgggtttg

SEQ ID NO: 960 - DNA, 41 bp, Homo sapiens
cagttgtcgagtaagtggtgyatagggtaagtgctctttct

SEQ ID NO: 961 - DNA, 41 bp, Homo sapiens
caaaggagctcatggcattgygaatgggacatttcttccgt

SEQ ID NO: 962 - DNA, 41 bp, Homo sapiens
tggagaaggggaggtttctcytagtgtggatgcggtatggt

SEQ ID NO: 963 - DNA, 41 bp, Homo sapiens
gaccgtggtgacggaggtttyctgggcatcgatgggtggtt

SEQ ID NO: 964 - DNA, 41 bp, Homo sapiens
tagcttaaataattattggcrttcatgttcagaatgcctga

SEQ ID NO: 965 - DNA, 41 bp, Homo sapiens
tttaaacttttattttaaatrtccatgaatggggtcggtat

SEQ ID NO: 966 - DNA, 41 bp, Homo sapiens
aaagatttaaacctacatatytttatgcccaatcatttgat

SEQ ID NO: 967 - DNA, 41 bp, Homo sapiens
gcgagggactcattttacagwggttggacacttcactgtgt

SEQ ID NO: 968 - DNA, 41 bp, Homo sapiens
ttcactgccggagcttggccrtgtgaacccggagccgggct

SEQ ID NO: 969 - DNA, 41 bp, Homo sapiens
ggtcagggtcacccttgagcygcgcacactaaatgacggga

SEQ ID NO: 970 - DNA, 41 bp, Homo sapiens
gagggcatcccgcgtcagtcrccagtgtcgaggcgtcagca

SEQ ID NO: 971 - DNA, 41 bp, Homo sapiens
cttccactctggggcggggaygctgtagaaggagcacaaag

SEQ ID NO: 972 - DNA, 41 bp, Homo sapiens
gtaactgttcagtgctttctyctttggatttcatgtaaatc

SEQ ID NO: 973 - DNA, 41 bp, Homo sapiens
gggacagaacgatgtggtggrgagaagagggcgtggcagag

SEQ ID NO: 974 - DNA, 41 bp, Homo sapiens
cgaaaaccccctttcaactgygaagtggtgggcggcatgtt

SEQ ID NO: 975 - DNA, 41 bp, Homo sapiens
ctagagtgggactgggcaccyggcatgtcccctcctgggct

SEQ ID NO: 976 - DNA, 41 bp, Homo sapiens
gcttcagagagccaaggtggstcttgaggtgcatagtgaag

SEQ ID NO: 977 - DNA, 41 bp, Homo sapiens
agtgtagcctccgcctcccgmttgactggcctgcttggcaa

SEQ ID NO: 978 - DNA, 41 bp, Homo sapiens
aggtgcagcggggagccggcyctcagggcgcatgcgccgcc

SEQ ID NO: 979 - DNA, 41 bp, Homo sapiens
tctctgagcctgtttccactyttaaaatgattatggtgatg

SEQ ID NO: 980 - DNA, 41 bp, Homo sapiens
aggcaaggcaggccgggcacrgtggctcacgcttgtaatcc

SEQ ID NO: 981 - DNA, 41 bp, Homo sapiens
ggccctgagctggcctgcgtmcagccacatcctctttcctg

SEQ ID NO: 982 - DNA, 41 bp, Homo sapiens
ttcacttcatttgcagtgagraaaccagctccgagaggtga

SEQ ID NO: 983 - DNA, 41 bp, Homo sapiens
ttttcccagacgtaaccgccrtcagagcgtggcatggagcc

SEQ ID NO: 984 - DNA, 41 bp, Homo sapiens
cgctgggttctttcccttacygtggtctcccaggcacttac

SEQ ID NO: 985 - DNA, 41 bp, Homo sapiens
tgtcagaacaggcctatggcrcccaaccacaagtcccccaa

SEQ ID NO: 986 - DNA, 41 bp, Homo sapiens
cagccccacaggcctgtgctmgctgtgtggggcttagggat

SEQ ID NO: 987 - DNA, 41 bp, Homo sapiens
cagagaccttgacccccccccatctaccatcatttccaaaa

SEQ ID NO: 988 - DNA, 40 bp, Homo sapiens
cagagaccttgaccccccccatctaccatcatttccaaaa

SEQ ID NO: 989 - DNA, 41 bp, Homo sapiens
ttaaaagttgacttttttctrccgggcacggtggctcacgc

SEQ ID NO: 990 - DNA, 41 bp, Homo sapiens
aaagttgacttttttctgccrggcacggtggctcacgcctg

SEQ ID NO: 991 - DNA, 41 bp, Homo sapiens
ggcggatgaaactctcctacmaagaagggccaaaccggccg

SEQ ID NO: 992 - DNA, 41 bp, Homo sapiens
ggggatgttgattacctaggycagtaaagtaaagaaggcat

SEQ ID NO: 993 - DNA, 41 bp, Homo sapiens
cttctgggccactgtatcctrtttctttcccttgttaccct

SEQ ID NO: 994 - DNA, 41 bp, Homo sapiens
ccctcttagaccgtatatagktctagcataggatctgcaca

SEQ ID NO: 995 - DNA, 41 bp, Homo sapiens
ttgtctggaccatctgccacrgtagataaagctctgaatca

SEQ ID NO: 996 - DNA, 41 bp, Homo sapiens
ggcgccatcgcactccagccygggcaacagagtgagactct

SEQ ID NO: 997 - DNA, 41 bp, Homo sapiens
agtgagactctgtcccccccscaaaaaaaaactataatcct

SEQ ID NO: 998 - DNA, 41 bp, Homo sapiens
atgatagtcctgaaaagatayatgaaagaacaatggccgtc

SEQ ID NO: 999 - DNA, 43 bp, Homo sapiens
  misc_feature (21)..(23): gtt is present or absent.
attagcatttctaaaacgttgttattcaccatcccaattaatg

SEQ ID NO: 1000 - DNA, 41 bp, Homo sapiens
cctgaacacctggcaccccarggctggcaccccagggctgg

SEQ ID NO: 1001 - DNA, 41 bp, Homo sapiens
gggctctctaggggcctgttygatggggacagggcaggtgg

SEQ ID NO: 1002 - DNA, 41 bp, Homo sapiens
gggcccgggcgggggaagggsacgcagaccgcggaccctaa

SEQ ID NO: 1003 - DNA, 41 bp, Homo sapiens
acataaacagaggccgggaasggggcggggaggagggagag

SEQ ID NO: 1004 - DNA, 41 bp, Homo sapiens
gcggtgttaaatggggagackatgtcctagtacgagctctg

SEQ ID NO: 1005 - DNA, 41 bp, Homo sapiens
gaattggctatatgctccccsggactggagcggcacagtcc

SEQ ID NO: 1006 - DNA, 41 bp, Homo sapiens
gtacaaaaccctttagctttkgcaaacctcctttaagaccc

SEQ ID NO: 1007 - DNA, 41 bp, Homo sapiens
ttaagacccgatttaaatgcytccctcctcatgaagctctt

SEQ ID NO: 1008 - DNA, 41 bp, Homo sapiens
aagctcttctggatccactcyttcccatcactaagttgaaa

SEQ ID NO: 1009 - DNA, 41 bp, Homo sapiens
cccatcactaagttgaaagtmagatccccttctctttactt

SEQ ID NO: 1010 - DNA, 41 bp, Homo sapiens
ttacagtgccctttataggaragaaagaagaaattgtgtct

SEQ ID NO: 1011 - DNA, 41 bp, Homo sapiens
tctctgtggagcaaatagagrgctgtctgacacttggttcc

SEQ ID NO: 1012 - DNA, 41 bp, Homo sapiens
gaatgtttgatttgtgaaaawcttaataacagtagtttttt

SEQ ID NO: 1013 - DNA, 41 bp, Homo sapiens
gtgctgacaatcttatactcyaggttgaacctccggggaag

SEQ ID NO: 1014 - DNA, 41 bp, Homo sapiens
gagcctcaatcacagattctstctagctcacatgaagttaa

SEQ ID NO: 1015 - DNA, 41 bp, Homo sapiens
ggagcatgactttgtggaagyctctcctcttccacccagag

SEQ ID NO: 1016 - DNA, 41 bp, Homo sapiens
gagggctgactgtcacccttygataggagcccagcactaaa

SEQ ID NO: 1017 - DNA, 41 bp, Homo sapiens
gtgggtgggaggaattggagsaggaagcttgcctaagtgtg

SEQ ID NO: 1018 - DNA, 41 bp, Homo sapiens
gtagcttctaaatcaacgaastgattcctggagagcagctt

SEQ ID NO: 1019 - DNA, 41 bp, Homo sapiens
ggaggcacctgtgacacccarcggagtaggggggcggtgtg

SEQ ID NO: 1020 - DNA, 41 bp, Homo sapiens
agtgtgcatatgtgctgaccrtgggagcttgtttgtcggtt

SEQ ID NO: 1021 - DNA, 41 bp, Homo sapiens
ggacacaggactgtgtggtcyggatatggcatgtggcttat

SEQ ID NO: 1022 - DNA, 41 bp, Homo sapiens
gctgtgggtgaagtgagttartggccccactcttagagatc

SEQ ID NO: 1023 - DNA, 41 bp, Homo sapiens
agtgcagccaaaattgcaaartcataccattcaaattaata

SEQ ID NO: 1024 - DNA, 41 bp, Homo sapiens
aagaaaagtgatttatttcargttgctgatgcttagattgt

SEQ ID NO: 1025 - DNA, 41 bp, Homo sapiens
tgcttagattgttagagttgsaaagatctggcttgcatctt

SEQ ID NO: 1026 - DNA, 41 bp, Homo sapiens
tctggcttgcatcttgtacarctgacagaactggggctcag

SEQ ID NO: 1027 - DNA, 41 bp, Homo sapiens
tgatagctgttgcctgcagcrtacggacgttcattgcgcag

SEQ ID NO: 1028 - DNA, 41 bp, Homo sapiens
tagctgttgcctgcagcatayggacgttcattgcgcagttc

SEQ ID NO: 1029 - DNA, 41 bp, Homo sapiens
tgttgcctgcagcatacggaygttcattgcgcagttcctgt

SEQ ID NO: 1030 - DNA, 41 bp, Homo sapiens
agcatacggacgttcattgcrcagttcctgtctcctgagat

SEQ ID NO: 1031 - DNA, 41 bp, Homo sapiens
acataaagcctgtgtgctgcygccaggaagactagaaacgc

SEQ ID NO: 1032 - DNA, 41 bp, Homo sapiens
gtcaccacatacctggcactrtgctaaggctgggaatgcag

SEQ ID NO: 1033 - DNA, 41 bp, Homo sapiens
ccagcccacttcatcttaccrtagttacctccttagagtat

SEQ ID NO: 1034 - DNA, 41 bp, Homo sapiens
tgtcaaagaggaactaaggaygccagggactttctgcttag

SEQ ID NO: 1035 - DNA, 41 bp, Homo sapiens
ccctctcatcacttctccaaygctggtatcatgaaccccat

SEQ ID NO: 1036 - DNA, 41 bp, Homo sapiens
gacagaagaaaagtccccagrgaagaatactacagacttgg

SEQ ID NO: 1037 - DNA, 41 bp, Homo sapiens
gatgggcatttgaacttgttrtctttaaaaagtgaaatctt

SEQ ID NO: 1038 - DNA, 41 bp, Homo sapiens
tatctggggagtgggcatttkctgactgaggcattggctgc

SEQ ID NO: 1039 - DNA, 41 bp, Homo sapiens
ggctacaaaactgtgctttcyttgggcagtaaaagaggcaa

SEQ ID NO: 1040 - DNA, 41 bp, Homo sapiens
tagagaacaagtctaattctrttttccttgaaatagtcgaa

SEQ ID NO: 1041 - DNA, 41 bp, Homo sapiens
aagtccatgattttttaggcraaatggcctcctttcctctt

SEQ ID NO: 1042 - DNA, 41 bp, Homo sapiens
ctttctttcacaaaattgccycccagagctttctggaaggg

SEQ ID NO: 1043 - DNA, 41 bp, Homo sapiens
ccagtccctcagccttgccaytgcttatgctggtctggaaa

SEQ ID NO: 1044 - DNA, 41 bp, Homo sapiens
gctcaccgctctgctcacccsaccctctggccatctcctct

SEQ ID NO: 1045 - DNA, 41 bp, Homo sapiens
cagcttggtcccagaggcctrgacctgggtcccagaggtcc

SEQ ID NO: 1046 - DNA, 41 bp, Homo sapiens
gctggttccccggcttggtcycagaggcctggatgtgtggc

SEQ ID NO: 1047 - DNA, 41 bp, Homo sapiens
cctaccacaccatgcacgtgyacagccaagggttgttgact

SEQ ID NO: 1048 - DNA, 41 bp, Homo sapiens
ctgggctcttcctggacctgrccagctaaaaggaaatctcc

SEQ ID NO: 1049 - DNA, 41 bp, Homo sapiens
gcattggtggtactaagaacrcatattccctatcctatagg

SEQ ID NO: 1050 - DNA, 41 bp, Homo sapiens
ctcccccaacattaaaagtgyaagggatgcttattcaaatg

SEQ ID NO: 1051 - DNA, 41 bp, Homo sapiens
ggcccaagaaactgcattttmgcatgctccctaaatgaagc

SEQ ID NO: 1052 - DNA, 41 bp, Homo sapiens
atgctaacagtgtagagtcayatgtgatgggaagcatcagg

SEQ ID NO: 1053 - DNA, 41 bp, Homo sapiens
cttgctcaatttattctgtcyatataactcaatattactga

SEQ ID NO: 1054 - DNA, 41 bp, Homo sapiens
catgtgaccctcttagctccrcggattaactcctgtcctca

SEQ ID NO: 1055 - DNA, 41 bp, Homo sapiens
gaaaccttctctgggttcctrtatcacaacctctctctccc

SEQ ID NO: 1056 - DNA, 41 bp, Homo sapiens
gcaacctggcgtcatgggccmgctggttaaaataaaattga

SEQ ID NO: 1057 - DNA, 41 bp, Homo sapiens
acagttctgaggcaataaccrtggttaagggttattgatct

SEQ ID NO: 1058 - DNA, 41 bp, Homo sapiens
cttctttcaaagcttgtggtycactggaccacgtatgaagt

SEQ ID NO: 1059 - DNA, 41 bp, Homo sapiens
atgaagtagaatagtttaggyccagaaaggcaattaagtaa

SEQ ID NO: 1060 - DNA, 41 bp, Homo sapiens
gtgctttgatacattctgagkttcagtaaagagacctgatg

SEQ ID NO: 1061 - DNA, 41 bp, Homo sapiens
tgagctttgtggcctaccaarggagaaactggctgcagcag

SEQ ID NO: 1062 - DNA, 41 bp, Homo sapiens
catcataaagatgacattgtrggctgtcacagttggaaggc

SEQ ID NO: 1063 - DNA, 41 bp, Homo sapiens
agaccacactatttagcttayttagtaataacattgcaaag

SEQ ID NO: 1064 - DNA, 41 bp, Homo sapiens
ttgcaaagaaaaattccgacraagttttttcagcctaggaa

SEQ ID NO: 1065 - DNA, 41 bp, Homo sapiens
gctctggtgaaattcctctcsctaccccaaacatcatcatt

SEQ ID NO: 1066 - DNA, 41 bp, Homo sapiens
acaaatgctcaccctttcagytggaatgattgaaattttgg

SEQ ID NO: 1067 - DNA, 41 bp, Homo sapiens
tgattaaggtggctactaccrggtgctttctgcatatctcg

SEQ ID NO: 1068 - DNA, 41 bp, Homo sapiens
taggaattccaagctgtgaaytttttactgaagctctttgg

SEQ ID NO: 1069 - DNA, 41 bp, Homo sapiens
atggaaatttgtttatattgwctacagattgccaatattat

SEQ ID NO: 1070 - DNA, 41 bp, Homo sapiens
gaaatttgtttatattgactrcagattgccaatattattag

SEQ ID NO: 1071 - DNA, 41 bp, Homo sapiens
ctaacaatcttatttccattsagtccttataaaagaagtgg

SEQ ID NO: 1072 - DNA, 41 bp, Homo sapiens
ctgacgtttaagggagaccgygtaggtccctttgaggactg

SEQ ID NO: 1073 - DNA, 41 bp, Homo sapiens
agtctgtaaattattgttctwttttttctttagcttatgct

SEQ ID NO: 1074 - DNA, 41 bp, Homo sapiens
tagcaaggccaatcattttascaacacacatgcttgctaac

SEQ ID NO: 1075 - DNA, 41 bp, Homo sapiens
ggaactgtctggtgtcccccwgcataggaagctgagccagg

SEQ ID NO: 1076 - DNA, 41 bp, Homo sapiens
attgctctgcagatcccctcrcagccctctgtcccttgttc

SEQ ID NO: 1077 - DNA, 41 bp, Homo sapiens
ctttatgtgggaagaaatttktttttttgattggggagtgg

SEQ ID NO: 1078 - DNA, 41 bp, Homo sapiens
aaatggcctggttctctgtcmcctttctgtctgtatgcctc

SEQ ID NO: 1079 - DNA, 41 bp, Homo sapiens
ggcagaaggcaaagcttaggwcctagagagtgctggaccac

SEQ ID NO: 1080 - DNA, 41 bp, Homo sapiens
caaagcttaggacctagagartgctggaccacgccactcac

SEQ ID NO: 1081 - DNA, 41 bp, Homo sapiens
cagggatttattaatgatttmttgtgaaatgtttggaaata

SEQ ID NO: 1082 - DNA, 41 bp, Homo sapiens
agtgccggaatacatttgcaygtaagacagaacgctgcctg

SEQ ID NO: 1083 - DNA, 41 bp, Homo sapiens
ggcagaggggtctcagaatcygcatttccaacaatgtctcc

SEQ ID NO: 1084 - DNA, 41 bp, Homo sapiens
cgtattgtctgcgggcatccygagggaggggggctgaagat

SEQ ID NO: 1085 - DNA, 41 bp, Homo sapiens
cccctcaagagtcagtttaartgttggtcatgttagttgtc

SEQ ID NO: 1086 - DNA, 41 bp, Homo sapiens
atgggagggcttgtgcttcaygaaaacatttttccagatca

SEQ ID NO: 1087 - DNA, 41 bp, Homo sapiens
tggggatggggaggactggcrcagggctgctgtgatggggt

SEQ ID NO: 1088 - DNA, 41 bp, Homo sapiens
ttctgcggtccctggctcccyacctgactccaggtgaacaa

SEQ ID NO: 1089 - DNA, 41 bp, Homo sapiens
gaaagaagtgtgggagcaaamgcatgatgttacatgtagac

SEQ ID NO: 1090 - DNA, 41 bp, Homo sapiens
agtgctctagagacaattggrttcaaatgtggagcaggctg

SEQ ID NO: 1091 - DNA, 41 bp, Homo sapiens
ctctatacaatcattatgctsccattgaaataataaataca

SEQ ID NO: 1092 - DNA, 41 bp, Homo sapiens
ctccaattcggtagaaccagrgcttcatcttctctgtcgaa

SEQ ID NO: 1093 - DNA, 41 bp, Homo sapiens
gtttgcagctgctgtttttcyggcagcacatctgtgcaggc

SEQ ID NO: 1094 - DNA, 41 bp, Homo sapiens
ggcattatttgtgaaacttayctaaaatcgaattcgggtcc

SEQ ID NO: 1095 - DNA, 41 bp, Homo sapiens
aattaaatttttgaaattttrtattaaaaattatattagta

SEQ ID NO: 1096 - DNA, 41 bp, Homo sapiens
caggctcagaggccttggccyatcaccctggctcacgtgtg

SEQ ID NO: 1097 - DNA, 41 bp, Homo sapiens
atgggcctggacaacagcatmctctggtttagctggttcat

SEQ ID NO: 1098 - DNA, 41 bp, Homo sapiens
cttttagacagaaaagttacrtgggatattatctcccacag

SEQ ID NO: 1099 - DNA, 41 bp, Homo sapiens
tatataaggagaaaccagttraaattacctattgaagaaac

SEQ ID NO: 1100 - DNA, 41 bp, Homo sapiens
ttctgcgtagttttgggtaartcacttatcttctttaggat

SEQ ID NO: 1101 - DNA, 41 bp, Homo sapiens
cagttgcctcatcagaaagawgaacagcattacgcctctgc

SEQ ID NO: 1102 - DNA, 41 bp, Homo sapiens
agttgagaacagaagatgatwgtcttttccaatgggacatg

SEQ ID NO: 1103 - DNA, 41 bp, Homo sapiens
tggtgttttgcttgagtaatrttttctgaactaagcacaac

SEQ ID NO: 1104 - DNA, 41 bp, Homo sapiens
ctgttgcctcagtctgggctycataggcatcagcagcccca

SEQ ID NO: 1105 - DNA, 41 bp, Homo sapiens
gcttcaatctcaccacttcgrtctccatgatgctgtttgac

SEQ ID NO: 1106 - DNA, 41 bp, Homo sapiens
ggttccaaccagaagagaatrtcagaaagtaagtgctgttg

SEQ ID NO: 1107 - DNA, 41 bp, Homo sapiens
tgaaagttcaagcgcagtgcsctgtgtccttacactccact

SEQ ID NO: 1108 - DNA, 41 bp, Homo sapiens
aggaccttacagtgggtagtrtcaggaggggtcaggggctg

SEQ ID NO: 1109 - DNA, 41 bp, Homo sapiens
aaagcaccagcgttagcctcrgtggcttccagcacgattcc

SEQ ID NO: 1110 - DNA, 41 bp, Homo sapiens
ccctcctcatctaaagtgaayacatggggctcatgtgcagg

SEQ ID NO: 1111 - DNA, 41 bp, Homo sapiens
catgggatactcttctgttakcacagaagagataaagggca

SEQ ID NO: 1112 - DNA, 41 bp, Homo sapiens
aaagctttgccattctagggrtcatagccatacagggtgaa

SEQ ID NO: 1113 - DNA, 41 bp, Homo sapiens
accccttttgccatgttgaarccaccatctccctgctctgt

SEQ ID NO: 1114 - DNA, 41 bp, Homo sapiens
gtcaaagaaaagagacttgtyaagaggtaagagccttggct

SEQ ID NO: 1115 - DNA, 41 bp, Homo sapiens
acctttcaccctcaggaagcraggctgttcacacggcacac

SEQ ID NO: 1116 - DNA, 41 bp, Homo sapiens
ctctttacttaagtacagtgkgaggaacagcggcatcagga

SEQ ID NO: 1117 - DNA, 41 bp, Homo sapiens
gttagaaattcagcaacttgsgcccagctcagacctactga

SEQ ID NO: 1118 - DNA, 41 bp, Homo sapiens
catacataggaaatgacaaaygtttatggatggatagtcta

SEQ ID NO: 1119 - DNA, 41 bp, Homo sapiens
tcatttaattctcaaaaaaakatgaaaaaatgaacactcag

SEQ ID NO: 1120 - DNA, 41 bp, Homo sapiens
aatggtaaaagccacttgttytttgcagcatcgtgcatgtg

SEQ ID NO: 1121 - DNA, 41 bp, Homo sapiens
actatcatgggagataatgaytatggttgtccatgattgga

SEQ ID NO: 1122 - DNA, 41 bp, Homo sapiens
caggacccagtgttctgagtyaccctgaatgtgagcactat

SEQ ID NO: 1123 - DNA, 41 bp, Homo sapiens
tatatgatttttaggttttgyttatcagcttcttcgctttt

SEQ ID NO: 1124 - DNA, 41 bp, Homo sapiens
ccttttaaaaagtaagcagtrgataaataaattcagtgaag

SEQ ID NO: 1125 - DNA, 41 bp, Homo sapiens
ctggatttcatggtgcctttsattttccacatgaaggttgt

SEQ ID NO: 1126 - DNA, 41 bp, Homo sapiens
tcttccctttgcagagacacrccctgccaggcaggggagga

SEQ ID NO: 1127 - DNA, 41 bp, Homo sapiens
ggctccttgttactgatttcygtcttttctctctgcctttt

SEQ ID NO: 1128 - DNA, 41 bp, Homo sapiens
taatagccctcatgctagaarggagccggagcctgtgtata

SEQ ID NO: 1129 - DNA, 41 bp, Homo sapiens
cctcatgctagaagggagccrgagcctgtgtataaggccag

SEQ ID NO: 1130 - DNA, 41 bp, Homo sapiens
ctttcctcaatgtctcagctrtctaactgtgtgtgtaatca

SEQ ID NO: 1131 - DNA, 41 bp, Homo sapiens
ctgtgcaccccactgtctggsttttaatgtcaggctgttct

SEQ ID NO: 1132 - DNA, 41 bp, Homo sapiens
tatgacaggactggacaccaraaataatgtcaaggtaaacc

SEQ ID NO: 1133 - DNA, 41 bp, Homo sapiens
aacctatctaaacctcagttycctcatctgtgaaatggaga

SEQ ID NO: 1134 - DNA, 41 bp, Homo sapiens
aactctgtacattttatcagyagcttatccatccattgcaa

SEQ ID NO: 1135 - DNA, 41 bp, Homo sapiens
caggcataggtgattcagagrtgaaaggtcaagtccctgaa

SEQ ID NO: 1136 - DNA, 41 bp, Homo sapiens
aaattaaaattactctgactkggaatccatcgttcagtaag

SEQ ID NO: 1137 - DNA, 41 bp, Homo sapiens
tgaaggtaaggaaaatagtgktatttgcttggatccactgg

SEQ ID NO: 1138 - DNA, 41 bp, Homo sapiens
gaaggtaaggaaaatagtgtyatttgcttggatccactggc

SEQ ID NO: 1139 - DNA, 41 bp, Homo sapiens
agcactggaaaagtcaaaccrtaactttgagaattaggtga

SEQ ID NO: 1140 - DNA, 41 bp, Homo sapiens
cttgttactcttttttccttstcatgggtgatagccatttg

SEQ ID NO: 1141 - DNA, 41 bp, Homo sapiens
tgatgtgggcatcccgcagcyccctccctgcccatcctgga

SEQ ID NO: 1142 - DNA, 41 bp, Homo sapiens
cattggttttatatgcttacmtttatgtgttagttattaaa

SEQ ID NO: 1143 - DNA, 41 bp, Homo sapiens
aataaatggttgattttgagwttgagtttcatagtccaaaa

SEQ ID NO: 1144 - DNA, 41 bp, Homo sapiens
ataaatggttgattttgagtytgagtttcatagtccaaaaa

SEQ ID NO: 1145 - DNA, 41 bp, Homo sapiens
agatgaaaaattatgtagatrataatgaatgatacggttct

SEQ ID NO: 1146 - DNA, 41 bp, Homo sapiens
tgtagatgataatgaatgatrcggttctaaaaagacaggtt

SEQ ID NO: 1147 - DNA, 41 bp, Homo sapiens
tacagccacacttaaaatggwcccattatgaaatacatatt

SEQ ID NO: 1148 - DNA, 41 bp, Homo sapiens
taggtgagaaaagaagtggcytgtattttgctgcaaagact

SEQ ID NO: 1149 - DNA, 41 bp, Homo sapiens
acaatataatttgcttgtttyttaagagtataatttagtga

SEQ ID NO: 1150 - DNA, 41 bp, Homo sapiens
tgttttttaagagtataattyagtgatttttggtaaattga

SEQ ID NO: 1151 - DNA, 41 bp, Homo sapiens
tttacattgctacataaaatycccctatgtacatgtaccta

SEQ ID NO: 1152 - DNA, 41 bp, Homo sapiens
gatctcctctcctgtctcttwcatttttgcagtagcaatgt

SEQ ID NO: 1153 - DNA, 41 bp, Homo sapiens
tggttgtaagaactgatttgrttggtatagctgtgagggcc

SEQ ID NO: 1154 - DNA, 41 bp, Homo sapiens
gtgttgctcacactcaaaatktctgggccttctcatttggt

SEQ ID NO: 1155 - DNA, 41 bp, Homo sapiens
aatatataccttatggctttyccacacgcattgacttcagg

SEQ ID NO: 1156 - DNA, 41 bp, Homo sapiens
ttatactgacttcaatagagstttcagacaaaaagttgttt

SEQ ID NO: 1157 - DNA, 41 bp, Homo sapiens
ttcacaattgtaaacaccacyacactgaacagcatcatccc

SEQ ID NO: 1158 - DNA, 41 bp, Homo sapiens
agggtgtggattcctgccccsacactcccgcccataggtcc

SEQ ID NO: 1159 - DNA, 41 bp, Homo sapiens
aacaaaaatgtgggtgtctcyaggcacgggaaacttggttc

SEQ ID NO: 1160 - DNA, 41 bp, Homo sapiens
aggagcccactgtaacaataytgggcagccttttttttttt

SEQ ID NO: 1161 - DNA, 41 bp, Homo sapiens
aacttcttccactttttccaraatttgaatattaacgctaa

SEQ ID NO: 1162 - DNA, 41 bp, Homo sapiens
ttccagaatttgaatattaaygctaaaggtgtaagacttca

SEQ ID NO: 1163 - DNA, 41 bp, Homo sapiens
aactattttgaagaaaacacracattttaatacagattgaa

SEQ ID NO: 1164 - DNA, 42 bp, Homo sapiens
tgacttaaatatttagacatatggtgtgtaggcctgcattcc

SEQ ID NO: 1165 - DNA, 40 bp, Homo sapiens
tgacttaaatatttagacatggtgtgtaggcctgcattcc

SEQ ID NO: 1166 - DNA, 41 bp, Homo sapiens
  misc_feature (21)..(21): c is present or absent.
ttctgatggggttgttgctgctgagaatcatgactgggtgg

SEQ ID NO: 1167 - DNA, 41 bp, Homo sapiens
  misc_feature (21)..(21): t is present or absent.
cattttctgtctgaaccccctcacccattcaggcagctgct

SEQ ID NO: 1168 - DNA, 41 bp, Homo sapiens
  misc_feature (21)..(21): t is present or absent.
tccctacttctccttttttttcatttgcctcctccacccac

SEQ ID NO: 1169 - DNA, 41 bp, Homo sapiens
cttttcagggaggagccaaagcgctcattgtctgtgcttct

SEQ ID NO: 1170 - DNA, 40 bp, Homo sapiens
cttttcagggaggagccaaacgctcattgtctgtgcttct

SEQ ID NO: 1171 - DNA, 41 bp, Homo sapiens
tttagcccatcctctccccccgccaccctccttattgaggc

SEQ ID NO: 1172 - DNA, 40 bp, Homo sapiens
tttagcccatcctctcccccgccaccctccttattgaggc

SEQ ID NO: 1173 - DNA, 41 bp, Homo sapiens
gagtgccttgggtactctcttgatgggggactccatgataa

SEQ ID NO: 1174 - DNA, 40 bp, Homo sapiens
gagtgccttgggtactctctgatgggggactccatgataa

SEQ ID NO: 1175 - DNA, 41 bp, Homo sapiens
  misc_feature (21)..(21): c is present or absent.
gctgtatattgtgaatgtcccgttttcaaaagcaaagccaa

SEQ ID NO: 1176 - DNA, 41 bp, Homo sapiens
cgtatgatattccccattctragtccagaatacctagaaat

SEQ ID NO: 1177 - DNA, 41 bp, Homo sapiens
tgtgagtatgggaaggggaarcttttctgtctgttgtcccc

SEQ ID NO: 1178 - DNA, 41 bp, Homo sapiens
caggggctccaggaggacgartgtgtatcctcccattgctc

SEQ ID NO: 1179 - DNA, 41 bp, Homo sapiens
gagaagttgggaagtctggcyagtggggccggtgcctggtg

SEQ ID NO: 1180 - DNA, 41 bp, Homo sapiens
cccagccccagtttccccacytgggaagggggctacttgtg

SEQ ID NO: 1181 - DNA, 41 bp, Homo sapiens
ctggcccatggaagggagggragggggccccgacggggcca

SEQ ID NO: 1182 - DNA, 41 bp, Homo sapiens
agggaggggagggggccccgrcggggccacagtaaaggagt

SEQ ID NO: 1183 - DNA, 41 bp, Homo sapiens
tgtgtatgttcttggtaaacyagcccttggtcttacacatc

SEQ ID NO: 1184 - DNA, 41 bp, Homo sapiens
cctctcctttggccacccgtsactacccccaactccgggcc

SEQ ID NO: 1185 - DNA, 41 bp, Homo sapiens
ggagaagctgttatcaccccrtttccagggggctgggaacc

SEQ ID NO: 1186 - DNA, 41 bp, Homo sapiens
ccccaaggtgggcggttcggkgattcagagagggcagctct

SEQ ID NO: 1187 - DNA, 41 bp, Homo sapiens
ggctcctgctctttgggagargtggggggccgtgcctgggg

SEQ ID NO: 1188 - DNA, 41 bp, Homo sapiens
ctgctctttgggagaggtggkgggccgtgcctggggatcca

SEQ ID NO: 1189 - DNA, 41 bp, Homo sapiens
tcagcctcagcctctccaaasagccaggcattccagtagag

SEQ ID NO: 1190 - DNA, 41 bp, Homo sapiens
accagacaccagggcagaaayggcacaggaccaaggagatg

SEQ ID NO: 1191 - DNA, 41 bp, Homo sapiens
agatggggtggggaagggccrctctgggcccagcctgctct

SEQ ID NO: 1192 - DNA, 41 bp, Homo sapiens
aaggcagccgccctgctcaargcctaggccattgtcctcct

SEQ ID NO: 1193 - DNA, 41 bp, Homo sapiens
cagaggcagatgacagtcttycgttaaagatttcactgctg

SEQ ID NO: 1194 - DNA, 41 bp, Homo sapiens
aatataactgatataattggracatttcatgttggcctagt

SEQ ID NO: 1195 - DNA, 41 bp, Homo sapiens
cacttgtgcttggacaagaaragaaggcctacaagaaaaag

SEQ ID NO: 1196 - DNA, 41 bp, Homo sapiens
caatcagaaatgtaagaaaamctccaagaaaaatttaagtt

SEQ ID NO: 1197 - DNA, 41 bp, Homo sapiens
accaaacttggaagtgtaaarttatgcatgtatgttcatgt

SEQ ID NO: 1198 - DNA, 41 bp, Homo sapiens
ttaacatagtgagtttggagycccaggattttattttcctt

SEQ ID NO: 1199 - DNA, 41 bp, Homo sapiens
caaccctcatgaattcttagytgggatgggtccctataaca

SEQ ID NO: 1200 - DNA, 41 bp, Homo sapiens
  misc_feature (21)..(21): a is present or absent.
gtagatgagcaaatgagttcaggagagatttaaatacccta

SEQ ID NO: 1201 - DNA, 41 bp, Homo sapiens
gtctatgcattcatgcatccrtctaaccagctgtctaccta

SEQ ID NO: 1202 - DNA, 41 bp, Homo sapiens
atgtgacttaaacttcaggtrtatcaatatcccttgaatgt

SEQ ID NO: 1203 - DNA, 41 bp, Homo sapiens
cagaaagaagacttttcagartatatatataatgaatatct

SEQ ID NO: 1204 - DNA, 41 bp, Homo sapiens
tttgagaaaaatttaaggtaatcttctatggcccacttcca

SEQ ID NO: 1205 - DNA, 40 bp, Homo sapiens
tttgagaaaaatttaaggtatcttctatggcccacttcca

SEQ ID NO: 1206 - DNA, 41 bp, Homo sapiens
ccctgtgaccaagcagataamctcatgctttatttagtcca

SEQ ID NO: 1207 - DNA, 42 bp, Homo sapiens
cctgtgtttgaaagaagcttttatatattttgtcttcattat

SEQ ID NO: 1208 - DNA, 40 bp, Homo sapiens
cctgtgtttgaaagaagcttatatattttgtcttcattat

SEQ ID NO: 1209 - DNA, 41 bp, Homo sapiens
ctttcttttgggaaaatatgyctttgtcttctatatatgaa

SEQ ID NO: 1210 - DNA, 42 bp, Homo sapiens
tacttacaggttgattttagatacacagcagactctgtcttc

SEQ ID NO: 1211 - DNA, 40 bp, Homo sapiens
tacttacaggttgattttagacacagcagactctgtcttc

SEQ ID NO: 1212 - DNA, 41 bp, Homo sapiens
ttacaccagaccccatacttkaacaccatatgtcacaaaat

SEQ ID NO: 1213 - DNA, 41 bp, Homo sapiens
gtaggcagcctattcttgatkatattcatcaatcatacaga

SEQ ID NO: 1214 - DNA, 41 bp, Homo sapiens
acagaaaaagtattgtagacrgaaataacaattcattgaga

SEQ ID NO: 1215 - DNA, 41 bp, Homo sapiens
aagggagcatgaatagtccasaagtaactgagaactgatta

SEQ ID NO: 1216 - DNA, 41 bp, Homo sapiens
caaaagaaagggagtaaagastcaacaatcagttagctttt

SEQ ID NO: 1217 - DNA, 41 bp, Homo sapiens
attttatttggggctttctaygtctctctctcctaagccta

SEQ ID NO: 1218 - DNA, 41 bp, Homo sapiens
tgtcatacttaactcttaaasatccagagtaaatgatggag

SEQ ID NO: 1219 - DNA, 41 bp, Homo sapiens
taccagttgacccagcaaccytcttatagagtagtttaaat

SEQ ID NO: 1220 - DNA, 41 bp, Homo sapiens
aatgatccacaaaattactastcattgttttctttcaatga

SEQ ID NO: 1221 - DNA, 41 bp, Homo sapiens
cacacacacacacacacacascaaatggaagcagccagaca

SEQ ID NO: 1222 - DNA, 41 bp, Homo sapiens
gaaaaagaaaatctggcttayatcatgttgaaaacaaaagt

SEQ ID NO: 1223 - DNA, 41 bp, Homo sapiens
tccaattccaccttctcctasagcatatcctgcagttacct

SEQ ID NO: 1224 - DNA, 41 bp, Homo sapiens
gtcttggttcatctcttgagwtaaattagatctgggaactt

SEQ ID NO: 1225 - DNA, 41 bp, Homo sapiens
tatgtcactctcaagaactcytataagaccaagagtcatct

SEQ ID NO: 1226 - DNA, 41 bp, Homo sapiens
ctgaaaatgaacactgaaccrttaatcatactgatatgtac

SEQ ID NO: 1227 - DNA, 41 bp, Homo sapiens
gtggagcacagcattttaggrcttgatatttgcttattata

SEQ ID NO: 1228 - DNA, 41 bp, Homo sapiens
ggtgacctggtgccatccccraccaggagacgcaggtgccc

SEQ ID NO: 1229 - DNA, 41 bp, Homo sapiens
ctgaggcacgagggacaagakgtcgtcggggagtgaaagca

SEQ ID NO: 1230 - DNA, 41 bp, Homo sapiens
ccactcttcaaaaggaggtayatgtgacagcagctggaaat

SEQ ID NO: 1231 - DNA, 41 bp, Homo sapiens
gaatccaccagggccatgggrctggcctctgattgggcaca

SEQ ID NO: 1232 - DNA, 41 bp, Homo sapiens
gcctgggctaggtgtaggggkcctgagttccgggctttgct

SEQ ID NO: 1233 - DNA, 41 bp, Homo sapiens
cttccctgtgttcacactaaycttttccttctttgaaattg

SEQ ID NO: 1234 - DNA, 41 bp, Homo sapiens
atagccaggagaagccttgaracccaggttgtttgttcagt

SEQ ID NO: 1235 - DNA, 41 bp, Homo sapiens
tccctgctaggaactgtttayataatgaaaggaggggacct

SEQ ID NO: 1236 - DNA, 41 bp, Homo sapiens
ctggccatcctgctacagcawctggagttcagcgtgccgcc

SEQ ID NO: 1237 - DNA, 41 bp, Homo sapiens
cggctgcgcttctccatcaaytgaagaagacaccaccattc

SEQ ID NO: 1238 - DNA, 41 bp, Homo sapiens
tgtatcctgtgaagcatcacrgttatccttctctgcacatg

SEQ ID NO: 1239 - DNA, 41 bp, Homo sapiens
tgacagcacttaccaacctasttcctctgatttttgagtca

SEQ ID NO: 1240 - DNA, 41 bp, Homo sapiens
gggggaagccacccccgcccragcgcctccggcttccctta

SEQ ID NO: 1241 - DNA, 41 bp, Homo sapiens
ttccgggaagcaagctcaagycgcggagagggaagggaggt

SEQ ID NO: 1242 - DNA, 41 bp, Homo sapiens
ctggggacaccgtgcggcctygattggaggtggctgtgatg

SEQ ID NO: 1243 - DNA, 41 bp, Homo sapiens
tgcccgcagcgttgtccccarattgcaggaaccgttacgcg

SEQ ID NO: 1244 - DNA, 41 bp, Homo sapiens
tgagtgtcacgccttctcctytctgtccccagcatgggcac

SEQ ID NO: 1245 - DNA, 41 bp, Homo sapiens
agcttctgggagattttttttgagtcaaagacttaaagggc

SEQ ID NO: 1246 - DNA, 40 bp, Homo sapiens
agcttctgggagatttttttgagtcaaagacttaaagggc

SEQ ID NO: 1247 - DNA, 41 bp, Homo sapiens
agtatagtggggttccatgakttatcatgaattttaaagta

SEQ ID NO: 1248 - DNA, 41 bp, Homo sapiens
  misc_feature (21)..(21): t is present or absent.
tttctttttctttttttttttaaaatttattcctatttcct

SEQ ID NO: 1249 - DNA, 41 bp, Homo sapiens
ttctttttcttttttttttttaaaatttattcctatttcct

SEQ ID NO: 1250 - DNA, 40 bp, Homo sapiens
ttctttttctttttttttttaaaatttattcctatttcct

SEQ ID NO: 1251 - DNA, 41 bp, Homo sapiens
  misc_feature (21)..(21): a is present or absent.
tttttctttttttttttaaaatttattcctatttccttaca

SEQ ID NO: 1252 - DNA, 43 bp, Homo sapiens
  misc_feature (21)..(23): tgt is present or absent.
attgtgtgagactcagaggttgtccgtgttagtctttgggatt

SEQ ID NO: 1253 - DNA, 41 bp, Homo sapiens
tcatgaagcctgtaaggcacrtctctgccccaagcagcttc

SEQ ID NO: 1254 - DNA, 41 bp, Homo sapiens
aaggcacatctctgccccaarcagcttctaatccagttctt

SEQ ID NO: 1255 - DNA, 41 bp, Homo sapiens
gagttctctgaaggagctaayaccagttagtgttttgaaga

SEQ ID NO: 1256 - DNA, 41 bp, Homo sapiens
agtgggcaggggagactaacygggtgtgtgaggggtgggct

SEQ ID NO: 1257 - DNA, 41 bp, Homo sapiens
gatttttcttaaagaaagaargaaagaaacatacaacatac

SEQ ID NO: 1258 - DNA, 41 bp, Homo sapiens
gcatcttgctgtccacaggcmggggcacctccaggattcag

SEQ ID NO: 1259 - DNA, 41 bp, Homo sapiens
ggccggggcacctccaggatycagaagatgactccagtagg

SEQ ID NO: 1260 - DNA, 41 bp, Homo sapiens
  misc_feature (21)..(21): t is present or absent.
ccgtgggttttttttttttttcttcatttctttggttgctg

SEQ ID NO: 1261 - DNA, 41 bp, Homo sapiens
atgttaggagggtatttttayatccctccagttaacaaata

SEQ ID NO: 1262 - DNA, 41 bp, Homo sapiens
ctggattgcaacattttaatyccaggtgtcaggtttccaac

SEQ ID NO: 1263 - DNA, 41 bp, Homo sapiens
gaatcaccagtgcgggaggtrtaacagtgaacccaagacac

SEQ ID NO: 1264 - DNA, 41 bp, Homo sapiens
ctgtagaacacaaggatattyggaggcagtttgtacatgcc

SEQ ID NO: 1265 - DNA, 41 bp, Homo sapiens
ccttcccacagagtcccgagwtcatgtggcagcatgccaga

SEQ ID NO: 1266 - DNA, 41 bp, Homo sapiens
aaagatttgctaagagattcrcagaggcaacctgaggccct

SEQ ID NO: 1267 - DNA, 41 bp, Homo sapiens
atgtttatattttatattaayattaatgtaaataaaaattt

SEQ ID NO: 1268 - DNA, 41 bp, Homo sapiens
attaaagtacactattcaggyatatcatgtaggtttacttt

SEQ ID NO: 1269 - DNA, 41 bp, Homo sapiens
gctgtggcctttgacaatgtrttacttagaaatgttgtttg

SEQ ID NO: 1270 - DNA, 41 bp, Homo sapiens
tggcctttgacaatgtgttayttagaaatgttgtttgtttt

SEQ ID NO: 1271 - DNA, 41 bp, Homo sapiens
ttccagcagagacaccaacargtaaaaacaccccagctaca

SEQ ID NO: 1272 - DNA, 41 bp, Homo sapiens
tttttttccctcatatttgcygtctgtgctacaatatgtga

SEQ ID NO: 1273 - DNA, 41 bp, Homo sapiens
ctctggtagccttttaattarttaattcattcatttactta

SEQ ID NO: 1274 - DNA, 41 bp, Homo sapiens
tggtagccttttaattaattmattcattcatttacttacat

SEQ ID NO: 1275 - DNA, 41 bp, Homo sapiens
ggttacagaaagaatggtggmttggccaaaaaatgatatgg

SEQ ID NO: 1276 - DNA, 41 bp, Homo sapiens
aaatgagagttaagtaggagmattttcttttatttttgtgc

SEQ ID NO: 1277 - DNA, 41 bp, Homo sapiens
gagaattttcttttatttttrtgcaggagaaatataaacaa

SEQ ID NO: 1278 - DNA, 41 bp, Homo sapiens
aggtgccttttctattgtccyatgcagacttaggtgatcct

SEQ ID NO: 1279 - DNA, 41 bp, Homo sapiens
gtctgacacagaaggatcaawggcaaaatgtgcaagacaaa

SEQ ID NO: 1280 - DNA, 41 bp, Homo sapiens
taggaggttcactgggaaacytgaattccactgagtcatga

SEQ ID NO: 1281 - DNA, 41 bp, Homo sapiens
tataaatacagtgttaaattygtctctcgtattttaaggta

SEQ ID NO: 1282 - DNA, 41 bp, Homo sapiens
tgtgtcagtaaaatattataytaagtaggtgaatgagatca

SEQ ID NO: 1283 - DNA, 41 bp, Homo sapiens
tatattaagtaggtgaatgakatcatgtaattgtgagacta

SEQ ID NO: 1284 - DNA, 41 bp, Homo sapiens
ttagagattcagacgaattcrtataatcttcgatggtgtat

SEQ ID NO: 1285 - DNA, 41 bp, Homo sapiens
gttaaaatgtggataaatacyacaatttgcaaaatatttgg

SEQ ID NO: 1286 - DNA, 41 bp, Homo sapiens
atttagaagttctatacatcytttatagtatattacacact

SEQ ID NO: 1287 - DNA, 41 bp, Homo sapiens
tatagtatattacacacttcraaaacacaaaattatttttt

SEQ ID NO: 1288 - DNA, 41 bp, Homo sapiens
caagtcatctcttcaaatttrttaattggagttccctgctc

SEQ ID NO: 1289 - DNA, 41 bp, Homo sapiens
ttagaaattggtctttcttaraatggtctagttaagttcca

SEQ ID NO: 1290 - DNA, 41 bp, Homo sapiens
cacgatctgtcctccgattcytgttaactctagactttctg

SEQ ID NO: 1291 - DNA, 41 bp, Homo sapiens
gtaaatccccggcaaaaaccrgcagcgccttgcaagcccac

SEQ ID NO: 1292 - DNA, 41 bp, Homo sapiens
agcatggcgcggggaggaggkgtgggagggtcgggagggac

SEQ ID NO: 1293 - DNA, 41 bp, Homo sapiens
tgaataatttaaaggggccgygcctgcggagccgggcggaa

SEQ ID NO: 1294 - DNA, 41 bp, Homo sapiens
tcttgccatatacttagtggrggggtctacatcaggggttt

SEQ ID NO: 1295 - DNA, 41 bp, Homo sapiens
agcctccagcctctcttctcygggggttatctcaggcatct

SEQ ID NO: 1296 - DNA, 41 bp, Homo sapiens
ggtgctggctctgggatcccygtgcgtcatgtagtctacct

SEQ ID NO: 1297 - DNA, 41 bp, Homo sapiens
tggcctcaagcaatcctcccrcctcggcctcccaaagtgct

SEQ ID NO: 1298 - DNA, 41 bp, Homo sapiens
gaatgtttatgtagaacagaragactgtatctgcggtcttc

SEQ ID NO: 1299 - DNA, 41 bp, Homo sapiens
tatctggtaccgaggaagctstggcctcgtccccaagggcc

SEQ ID NO: 1300 - DNA, 41 bp, Homo sapiens
atccaggtccaccgcctgccygtcttgattgttttaatctg

SEQ ID NO: 1301 - DNA, 41 bp, Homo sapiens
agcccccgctcgggtaaggcytgggaccctgcccggtggtg

SEQ ID NO: 1302 - DNA, 41 bp, Homo sapiens
gccaccgcgccctgcgccttyatatttttcttaacccttcc

SEQ ID NO: 1303 - DNA, 41 bp, Homo sapiens
agagccggccggcccagagcrtgctgggagatgtagtccgg

SEQ ID NO: 1304 - DNA, 41 bp, Homo sapiens
gaagaaatcgtgcccctgagrgtttcaaaccctaagtagga

SEQ ID NO: 1305 - DNA, 41 bp, Homo sapiens
ttcaaaccctaagtaggaccsaggtgcagagcattctgggg

SEQ ID NO: 1306 - DNA, 41 bp, Homo sapiens
ccactgtactccagccgggaygacagagctagaacctgttt

SEQ ID NO: 1307 - DNA, 41 bp, Homo sapiens
tggaaaatagtctgtggattkttgtttaggactctgggcac

SEQ ID NO: 1308 - DNA, 41 bp, Homo sapiens
acagctggtctaggctgttastggagaaactgggaagcaac

SEQ ID NO: 1309 - DNA, 41 bp, Homo sapiens
  misc_feature (21)..(21): a is present or absent.
gaagcaacagctgggtcaaaagtagcttttcttttcttggc

SEQ ID NO: 1310 - DNA, 41 bp, Homo sapiens
cactgcaacctctgcctcccrggttcaagtgattctcctgc

SEQ ID NO: 1311 - DNA, 41 bp, Homo sapiens
ctgcctcgttttatgttcagktcccccattagacagaggaa

SEQ ID NO: 1312 - DNA, 41 bp, Homo sapiens
agtctgggagcacaggagcargaatttcagataaggaggaa

SEQ ID NO: 1313 - DNA, 41 bp, Homo sapiens
tggggagggtggtgggtgggsctggagcctcaaattctttc

SEQ ID NO: 1314 - DNA, 41 bp, Homo sapiens
caaattctttcagacctgagytcaagttctcggcttccaac

SEQ ID NO: 1315 - DNA, 41 bp, Homo sapiens
cagacctgagttcaagttctyggcttccaaccacggagcct

SEQ ID NO: 1316 - DNA, 41 bp, Homo sapiens
gtggggcggctggtgacctcmgccgtccgtattccgcagct

SEQ ID NO: 1317 - DNA, 41 bp, Homo sapiens
gcctgcagcaaccgctgacgycacgtggggttggggggatg

SEQ ID NO: 1318 - DNA, 41 bp, Homo sapiens
cgtcccaggtcagcgagcccrtcgggccggctgggcctccg

SEQ ID NO: 1319 - DNA, 41 bp, Homo sapiens
acctcccgcaccacacacacrcacacgcgtgggcacacaca

SEQ ID NO: 1320 - DNA, 41 bp, Homo sapiens
aaaaatacaaaaaattaaccrggctggtggggtgtgcctgt

SEQ ID NO: 1321 - DNA, 41 bp, Homo sapiens
ttaaccaggctggtggggtgygcctgtaatcccagctactc

SEQ ID NO: 1322 - DNA, 41 bp, Homo sapiens
aaatcacttgaacctgggagktggaggttgcagtgagctga

SEQ ID NO: 1323 - DNA, 41 bp, Homo sapiens
gtgtgcacaccagctatataygcaaatgctttctctcaggg

SEQ ID NO: 1324 - DNA, 41 bp, Homo sapiens
gcacaccagctatatatgcamatgctttctctcaggggcag

SEQ ID NO: 1325 - DNA, 41 bp, Homo sapiens
tgaaatagggcatttgccaaygcatgccagtctgtcccgtt

SEQ ID NO: 1326 - DNA, 41 bp, Homo sapiens
gcacacacgtagataggatgyggcacctctgaccgagttaa

SEQ ID NO: 1327 - DNA, 41 bp, Homo sapiens
tggtgcctgcataggtggtcyggctaagctttgctacttaa

SEQ ID NO: 1328 - DNA, 41 bp, Homo sapiens
ggtgcctgcataggtggtctrgctaagctttgctacttaaa

SEQ ID NO: 1329 - DNA, 41 bp, Homo sapiens
gtctgtcaagggcaggacagrggatgtgtaggcgagtgtgc

SEQ ID NO: 1330 - DNA, 41 bp, Homo sapiens
aatggcttcctgtcgttttcrgactggggacccaccttctg

SEQ ID NO: 1331 - DNA, 41 bp, Homo sapiens
atcttctgatgactgggcttyggtgcagtaactggtgtttg

SEQ ID NO: 1332 - DNA, 41 bp, Homo sapiens
gatactgttggtgggagaaaygacagagagtgtaaaacagt

SEQ ID NO: 1333 - DNA, 41 bp, Homo sapiens
gtttctcaacaggtgcattcktgacgtttcagactggataa

SEQ ID NO: 1334 - DNA, 41 bp, Homo sapiens
cagaaggcgtggaggcctgcygcgcctccctctgttgctgc

SEQ ID NO: 1335 - DNA, 41 bp, Homo sapiens
attgcttgaacccaggaggcrgaggttgcagtgagccaagg

SEQ ID NO: 1336 - DNA, 41 bp, Homo sapiens
ggaactgcttgggtcacagcytcgttttgttcccagtatcc

SEQ ID NO: 1337 - DNA, 41 bp, Homo sapiens
aagagaaataggtcattaggwtgaatttgttaggcaagaga

SEQ ID NO: 1338 - DNA, 41 bp, Homo sapiens
cacagcgtggagacggggcarggaggggggttattaggatt

SEQ ID NO: 1339 - DNA, 41 bp, Homo sapiens
catattaatagaagagtcttygttccagacgcagtccagga

SEQ ID NO: 1340 - DNA, 41 bp, Homo sapiens
atcaaagtggctttgattttkgcataagaatggtgactctt

SEQ ID NO: 1341 - DNA, 41 bp, Homo sapiens
gataagttctagaactggcamctaatgatatggactagaag

SEQ ID NO: 1342 - DNA, 41 bp, Homo sapiens
gtcatatcccacccccaaatmgacccaataggtacaatgaa

SEQ ID NO: 1343 - DNA, 41 bp, Homo sapiens
agttatgaaaccgatttttcygggactggttgttctagtct

SEQ ID NO: 1344 - DNA, 41 bp, Homo sapiens
aggtttccagatgtgttcccyaggcattcctggtggtagga

SEQ ID NO: 1345 - DNA, 41 bp, Homo sapiens
cttattctttggtcagttggytttctaccacctcttagctt

SEQ ID NO: 1346 - DNA, 41 bp, Homo sapiens
gttaaggatatgtgaactcaraatttttatacacagtgcaa

SEQ ID NO: 1347 - DNA, 41 bp, Homo sapiens
ggactagtggaagaattagasctttcctgaataaatagatc

SEQ ID NO: 1348 - DNA, 41 bp, Homo sapiens
aaaactggcaggagaatttcrctggagctgcatgcaggact

SEQ ID NO: 1349 - DNA, 41 bp, Homo sapiens
gggtattggaaagttcttgcrgctgctggaggctgcggtgt

SEQ ID NO: 1350 - DNA, 41 bp, Homo sapiens
ggtataaggcaagattttttwaaaaaattaattgcttaatc

SEQ ID NO: 1351 - DNA, 41 bp, Homo sapiens
ggactcttaccagcttagttkcctggttttctaatctaaaa

SEQ ID NO: 1352 - DNA, 41 bp, Homo sapiens
tggccaggaaggagtacaccrttggagaaacagtgaacctg

SEQ ID NO: 1353 - DNA, 41 bp, Homo sapiens
aactttttaagtcttaagacwggaaggcctgtgtcctaggc

SEQ ID NO: 1354 - DNA, 41 bp, Homo sapiens
ccctctcaccgccccatgccrcttttcctcctttgtaccat

SEQ ID NO: 1355 - DNA, 41 bp, Homo sapiens
agtgctgcgattacaagcctsagccacctgcacagcctctg

SEQ ID NO: 1356 - DNA, 41 bp, Homo sapiens
taccataatttatgtgtcctrtatgacatgaatttcattgg

SEQ ID NO: 1357 - DNA, 41 bp, Homo sapiens; identical to SEQ ID NO: 1346

SEQ ID NO: 1358 - DNA, 41 bp, Homo sapiens
ttaatgaggttaagcacatgktcatatgtttaaaagccttt

SEQ ID NO: 1359 - DNA, 41 bp, Homo sapiens
catgagttttctgagccccastttatctaactataaaatga

SEQ ID NO: 1360 - DNA, 41 bp, Homo sapiens
gtgcagggtccccctgatgcyatagccagttcctctttaga

SEQ ID NO: 1361 - DNA, 41 bp, Homo sapiens
atgagctgaaagcaaaggttytcagccccttcccctgataa

SEQ ID NO: 1362 - DNA, 41 bp, Homo sapiens
ttccaggtgacacatttagtrcctaatttgggaaatgttaa

SEQ ID NO: 1363 - DNA, 41 bp, Homo sapiens
tgttaatctagtccaatcccmttagtaagaaaggaggggtc

SEQ ID NO: 1364 - DNA, 41 bp, Homo sapiens
catcctgatgcacagttattyaaatttaagctccatttgtt

SEQ ID NO: 1365 - DNA, 41 bp, Homo sapiens
atgtatggagtatttatggartaaagtattccatgctgtat

SEQ ID NO: 1366 - DNA, 41 bp, Homo sapiens
caagcaataggattgttttcratattcttcatcatccttgc

SEQ ID NO: 1367 - DNA, 41 bp, Homo sapiens
tatactgaggatctttctgayagggaggaattattatgtcc

SEQ ID NO: 1368 - DNA, 41 bp, Homo sapiens
tgagccaactactgtactagrcactggggcactcaatgaat

SEQ ID NO: 1369 - DNA, 41 bp, Homo sapiens
atgggccagacccaactcackgattttttagtgtatctgag

SEQ ID NO: 1370 - DNA, 41 bp, Homo sapiens
gggtccctaaagtttcctttsctctaactcaaaggacctaa

SEQ ID NO: 1371 - DNA, 41 bp, Homo sapiens
cagattggcccagcaaaggcmagatccagtttaacaactac

SEQ ID NO: 1372 - DNA, 41 bp, Homo sapiens
aacaactaccaagtgcggtaycgacctgagctggatctggt

SEQ ID NO: 1373 - DNA, 41 bp, Homo sapiens
agagggatcacttgtgacatyggtagcatggagaaggtagg

SEQ ID NO: 1374 - DNA, 41 bp, Homo sapiens
ttccctaggatggacacgtcrtttccagaactttgaaatgt

SEQ ID NO: 1375 - DNA, 41 bp, Homo sapiens
gtgttaggtgatgcctggcayagaattttcatccaggtctg

SEQ ID NO: 1376 - DNA, 41 bp, Homo sapiens
gccaaaattttacatcacgcraatgaaaacgaacaaggtta

SEQ ID NO: 1377 - DNA, 41 bp, Homo sapiens
ctggctccatcttttacccayggacgtattccttactcttc

SEQ ID NO: 1378 - DNA, 41 bp, Homo sapiens
gtgaatttttattataagctygttctccttaaaactttatc

SEQ ID NO: 1379 - DNA, 41 bp, Homo sapiens
acatccttctcccctcagtcytcggttagtggcagtattct

SEQ ID NO: 1380 - DNA, 41 bp, Homo sapiens
tggcagtagagcagggtgagraggattattctgcagaggaa

SEQ ID NO: 1381 - DNA, 41 bp, Homo sapiens
gctttggagccatagtcatgyactcaaaatttattttatct

SEQ ID NO: 1382 - DNA, 41 bp, Homo sapiens
tactctttacctgtgaagagyagaacatgaagaaatctact

SEQ ID NO: 1383 - DNA, 41 bp, Homo sapiens
cttgctggaggaagggtgctmgaaaatataccaaatccaag

SEQ ID NO: 1384 - DNA, 41 bp, Homo sapiens
gaaataatattcaagttctgmaataatatcatgacctatag

SEQ ID NO: 1385 - DNA, 41 bp, Homo sapiens
gatatgaatcagaattcatcygtgtctcaagaaaaggtcat

SEQ ID NO: 1386 - DNA, 41 bp, Homo sapiens
tgtctcaagaaaaggtcatgygataaattaagttctgctag

SEQ ID NO: 1387 - DNA, 41 bp, Homo sapiens
aattaatttatcatcatctgrtcaccatttcacacaactca

SEQ ID NO: 1388 - DNA, 41 bp, Homo sapiens
cataagttgaaatgtccccartgattcagctgatgcgcgtt

SEQ ID NO: 1389 - DNA, 41 bp, Homo sapiens
  misc_feature (21)..(21): g is present or absent.
gctctctggcttcgacgggggactagaggttagtctcacct

SEQ ID NO: 1390 - DNA, 41 bp, Homo sapiens
attaactattcaaaatacttyggaaatttgacatctcctta

SEQ ID NO: 1391 - DNA, 41 bp, Homo sapiens
ttagctctcttactgcttcayagtggaagaatcaaatactt

SEQ ID NO: 1392 - DNA, 41 bp, Homo sapiens
aaacactctgaatattaaacygctcctggaaccacagctca

SEQ ID NO: 1393 - DNA, 41 bp, Homo sapiens
agttgtccttgccctttgccyttctagaggtgcaaaaaata

SEQ ID NO: 1394 - DNA, 41 bp, Homo sapiens
tgcaggaagttaggaaactaytataaatcggaagaagggaa

SEQ ID NO: 1395 - DNA, 41 bp, Homo sapiens
caaaccaacctgatttataarcataagaacattctactact

SEQ ID NO: 1396 - DNA, 41 bp, Homo sapiens
gtttggtgggctagggctacrgtaggagtgggaacaagaga

SEQ ID NO: 1397 - DNA, 41 bp, Homo sapiens
caacagtaaagttacaatctraaaggaatgctctctgttta

SEQ ID NO: 1398 - DNA, 41 bp, Homo sapiens
tttccctgaggaatggttatyctctgtgttccttgagtcca

SEQ ID NO: 1399 - DNA, 41 bp, Homo sapiens
ccacatcaggttttccccagrcaccttgggacagtttgaaa

SEQ ID NO: 1400 - DNA, 41 bp, Homo sapiens
aaaaccctaaccattgacacrtgtgaatgttttcctgggga

SEQ ID NO: 1401 - DNA, 41 bp, Homo sapiens
cgtgcctcctttctactggtrtttgtcttaattggccattt

SEQ ID NO: 1402 - DNA, 41 bp, Homo sapiens
ctgacctgtttttggctgacrggttttagttcctcccctca

SEQ ID NO: 1403 - DNA, 41 bp, Homo sapiens
tcttggtattaaaagatccaragagataggaatatgtaatt

SEQ ID NO: 1404 - DNA, 41 bp, Homo sapiens
tgcacttaggaaaaaaacaayatggaaatgtgtaaaatata

SEQ ID NO: 1405 - DNA, 41 bp, Homo sapiens
tgtaaaatatacttttttttwaaaaaaaaggacacatttat

SEQ ID NO: 1406 - DNA, 41 bp, Homo sapiens
aggacacatttattcagcatyatgatcagactattacattt

SEQ ID NO: 1407 - DNA, 41 bp, Homo sapiens
caccttggtttcatggtttgrcaaagtactggcctgtacca

SEQ ID NO: 1408 - DNA, 41 bp, Homo sapiens
caccaacaaatatctttttcrcagttgggtgggcatctggt

SEQ ID NO: 1409 - DNA, 41 bp, Homo sapiens
agactctgacttagacatgayggcaggggaaagagagactt

SEQ ID NO: 1410 - DNA, 41 bp, Homo sapiens
taaaatacagatgtgttgtamtaagttctgcaagcctttgg

SEQ ID NO: 1411 - DNA, 41 bp, Homo sapiens
  misc_feature (21)..(21): a is present or absent.
ggggaggtgtccaggcacgaacatggagagctggacttgat

SEQ ID NO: 1412 - DNA, 41 bp, Homo sapiens
ggaggtgtccaggcacgaacwtggagagctggacttgatac

SEQ ID NO: 1413 - DNA, 41 bp, Homo sapiens
tgcagccttgatcttctgggytcaagcgatcctcctgcctc

SEQ ID NO: 1414 - DNA, 41 bp, Homo sapiens
cttggataaagtctgagagcstaaatatggtctccaagtgg

SEQ ID NO: 1415 - DNA, 41 bp, Homo sapiens
gtccttcaattttgtggtgarcttaaaaacaggactctaaa

SEQ ID NO: 1416 - DNA, 41 bp, Homo sapiens
tattaagtggtgtgttaaagrttgtgctataatgaattgta

SEQ ID NO: 1417 - DNA, 44 bp, Homo sapiens
aagggctggaagagtgaaagaaaggaggctatttgctcccagac

SEQ ID NO: 1418 - DNA, 40 bp, Homo sapiens
aagggctggaagagtgaaaggaggctatttgctcccagac

SEQ ID NO: 1419 - DNA, 41 bp, Homo sapiens
gcagcctctctggcctatagkttgatttataaggggctggt

SEQ ID NO: 1420 - DNA, 41 bp, Homo sapiens
ttgatttataaggggctggtytcccagaagtgaagagaaat

SEQ ID NO: 1421 - DNA, 41 bp, Homo sapiens
tctcctttggcaggtaggtgrtgggcagctgggtccatttg

SEQ ID NO: 1422 - DNA, 41 bp, Homo sapiens
cttcacccgtatgccaggacytggggatgcttttctcttgt

SEQ ID NO: 1423 - DNA, 41 bp, Homo sapiens
gcagcagtggtgctccctccrtgggcagccccgtcaggtcc

SEQ ID NO: 1424 - DNA, 43 bp, Homo sapiens
  misc_feature (21)..(23): gtg is present or absent.
atggtgcccaggtggatgtggtgtccatctcattcctgtcttt

SEQ ID NO: 1425 - DNA, 41 bp, Homo sapiens
agctgcaggactggaattccygtggggatcgcacagtgctg

SEQ ID NO: 1426 - DNA, 52 bp, Homo sapiens
  misc_feature (21)..(21): n is g or t.
  misc_feature (23)..(23): g is present or absent.
  misc_feature (24)..(24): t is present or absent.
  misc_feature (25)..(28): g is present or absent.
  misc_feature (29)..(29): t is present or absent.
  misc_feature (30)..(31): g is present or absent.
  misc_feature (32)..(32): a is present or absent.
aggtggggtggggtggggtgnggtggggtggaggctgtctgtgtccaggaaa

SEQ ID NO: 1427 - DNA, 41 bp, Homo sapiens
acggggcaggaggttctgggmagaggacacctggagcgctg

SEQ ID NO: 1428 - DNA, 41 bp, Homo sapiens
agttaactcccttgctgacargcgtgcttcttgataggcca

SEQ ID NO: 1429 - DNA, 42 bp, Homo sapiens
  misc_feature (21)..(22): at is present or absent.
gataggccaaaaccgtaactatctttccaaaacatagaccgc

SEQ ID NO: 1430 - DNA, 41 bp, Homo sapiens
agttctccaataaggcagatraagttaagataaaatttgta

SEQ ID NO: 1431 - DNA, 41 bp, Homo sapiens
aattaatatcatttattgctrtattgttgtcagtgttatct

SEQ ID NO: 1432 - DNA, 41 bp, Homo sapiens
tgcttcttttcaagccagccrgctttaaaaaaaagttagct

SEQ ID NO: 1433 - DNA, 41 bp, Homo sapiens
caggttttcagggctcatgtrgacctgaagaaaaatgagag

SEQ ID NO: 1434 - DNA, 41 bp, Homo sapiens
attctactttctcaacttctyttattacattatctcatcat

SEQ ID NO: 1435 - DNA, 41 bp, Homo sapiens
ccactctgaaacttccccctrctttttttccttgtcagcag

SEQ ID NO: 1436 - DNA, 41 bp, Homo sapiens
ttctctaatgaaaaaaaaaaacatattaattgaccatagtt

SEQ ID NO: 1437 - DNA, 40 bp, Homo sapiens
ttctctaatgaaaaaaaaaacatattaattgaccatagtt

SEQ ID NO: 1438 - DNA, 41 bp, Homo sapiens
aaaacaatttgtgtgtgtgcrtgtgcttcaaggttaatgtt

SEQ ID NO: 1439 - DNA, 41 bp, Homo sapiens
taaccactctgccctcagtaygaaacacagtgccgaaccca

SEQ ID NO: 1440 - DNA, 41 bp, Homo sapiens
atcctgtgaggtggggaagcrtatggctagcataaatataa

SEQ ID NO: 1441 - DNA, 41 bp, Homo sapiens
tgttaccttactgcctcattstcattcttcccacctgctat

SEQ ID NO: 1442 - DNA, 41 bp, Homo sapiens
ctccttcctaaccttagcaasagtctggagatttacttatc

SEQ ID NO: 1443 - DNA, 41 bp, Homo sapiens
ggcttaggcctaagggctgaygttggggccagtacccctga

SEQ ID NO: 1444 - DNA, 41 bp, Homo sapiens
agctatgaaaacaagaccctrtccttctagaggtagcaaaa

SEQ ID NO: 1445 - DNA, 41 bp, Homo sapiens
aaacggaaaaacctactcagmgcgggccattgaccgcccgg

SEQ ID NO: 1446 - DNA, 41 bp, Homo sapiens
tgctggtcctgggggtagccrtcgtggtgaggctttcccca

SEQ ID NO: 1447 - DNA, 41 bp, Homo sapiens
cccccacttaaaacatttgtsccctctgtctccccattcca

SEQ ID NO: 1448 - DNA, 41 bp, Homo sapiens
cctgctccggtactgccagcygcagggtgcagagttggggt

SEQ ID NO: 1449 - DNA, 41 bp, Homo sapiens
agttcatagcattctcgctcrgccccctcaggcctgctgct

SEQ ID NO: 1450 - DNA, 41 bp, Homo sapiens
ggcaatgtgcggactgtgcgwgccttcgccatggagcaacg

SEQ ID NO: 1451 - DNA, 41 bp, Homo sapiens
tttccgcagctgcatggacaycctcgcgtgccccgtttctg

SEQ ID NO: 1452 - DNA, 41 bp, Homo sapiens
cctcttggaggtccttctagygctgcctatgtggagattct

SEQ ID NO: 1453 - DNA, 41 bp, Homo sapiens
  misc_feature (21)..(21): c is present or absent.
ttcctgcctggtgcctcccccggctgcctttagcaagtgct

SEQ ID NO: 1454 - DNA, 41 bp, Homo sapiens
tcctgcctggtgcctcccccrgctgcctttagcaagtgctg

SEQ ID NO: 1455 - DNA, 41 bp, Homo sapiens
cagggccgagcagggagtccrtgggtcagctgggctccctt

SEQ ID NO: 1456 - DNA, 42 bp, Homo sapiens
tcctccactgccacaaggggggccttctttcctgggacaatc

SEQ ID NO: 1457 - DNA, 40 bp, Homo sapiens
tcctccactgccacaaggggccttctttcctgggacaatc

SEQ ID NO: 1458 - DNA, 41 bp, Homo sapiens
tgctctcgggagaccctggcygtcttcacatgtcctcagct

SEQ ID NO: 1459 - DNA, 41 bp, Homo sapiens
atccaggtctagagaagcctrtagtggaggtgctgagctgc

SEQ ID NO: 1460 - DNA, 41 bp, Homo sapiens
acagttgtgtcagggaagacsagaaccacagccaaagggga

SEQ ID NO: 1461 - DNA, 41 bp, Homo sapiens
accacagccaaaggggacagwgtcgttgtgtggggacaggg

SEQ ID NO: 1462 - DNA, 41 bp, Homo sapiens
gttggagccttgggctctgtragggggacagagggaatcat

SEQ ID NO: 1463 - DNA, 41 bp, Homo sapiens
cctatcccctggctcaccccrggacccacagtccccatctt

SEQ ID NO: 1464 - DNA, 41 bp, Homo sapiens
ccctctttcaggggtgtgatrcagtgcattgatggagcagc

SEQ ID NO: 1465 - DNA, 43 bp, Homo sapiens
  misc_feature (21)..(23): gtg is present or absent.
tagaccgcaggagccgcgccgtcttcctaacctcgcctcggcc

SEQ ID NO: 1466 - DNA, 41 bp, Homo sapiens
agggtgccaggccaggcacgsgttggggggcgtctgggcac

SEQ ID NO: 1467 - DNA, 41 bp, Homo sapiens
tgggcccagcacgtggggccyggaactacctcaaaggcttc

SEQ ID NO: 1468 - DNA, 41 bp, Homo sapiens
accagctcagcctgcccagcrtgcacacggcaccaagctgg

SEQ ID NO: 1469 - DNA, 41 bp, Homo sapiens
agatccaagggatccagaggytggaatgtgaccctccgtgc

SEQ ID NO: 1470 - DNA, 41 bp, Homo sapiens
gggaagccagatgcccacaargctctgtgacttcacttcca

SEQ ID NO: 1471 - DNA, 41 bp, Homo sapiens
gccaagtgtcaagatcgagcraggggagggcctgacgaggg

SEQ ID NO: 1472 - DNA, 41 bp, Homo sapiens
cagaatccagatgcccgtaaygttgttaagaagcctgcaca

SEQ ID NO: 1473 - DNA, 41 bp, Homo sapiens
ggccaggcggggaggggtacyggccagaccggtgggcaaaa

SEQ ID NO: 1474 - DNA, 41 bp, Homo sapiens
agagtcacagggttggggtgmccccgggaaggtggcatcta

SEQ ID NO: 1475 - DNA, 41 bp, Homo sapiens
taccagccctgtgctttcagrgaccatgtgacctgtcaact

SEQ ID NO: 1476 - DNA, 41 bp, Homo sapiens
cccgaggtgcctggcttcacrgcaggattgccgtcctgcag

SEQ ID NO: 1477 - DNA, 41 bp, Homo sapiens
aaagtggccccgtggcttgtyccctgaagccctaaagcacc

SEQ ID NO: 1478 - DNA, 41 bp, Homo sapiens
ccacagacaagccgggtagcmcacctcgcagctcaacacac

SEQ ID NO: 1479 - DNA, 41 bp, Homo sapiens
cctggttttgggccctgttcrtgtggacgtacatttcactc

SEQ ID NO: 1480 - DNA, 41 bp, Homo sapiens
ggtaccaggagtcgggtatcrgtgggacaggaacgcgtgtc

SEQ ID NO: 1481 - DNA, 41 bp, Homo sapiens
gggccccaggagctctcccakactatcagcctcctgggctg

SEQ ID NO: 1482 - DNA, 41 bp, Homo sapiens
cccaggcctgcagcactgaargacgacctgccatgtcccat

SEQ ID NO: 1483 - DNA, 41 bp, Homo sapiens
tcgcgtctgcgcgctccgccyggtctgccggcgtgagaaag

SEQ ID NO: 1484 - DNA, 41 bp, Homo sapiens
acaaggggcggttgcgcccckcagcggccggactcccggag

SEQ ID NO: 1485 - DNA, 41 bp, Homo sapiens
ccacttccctccgccgggcckctccttctccacacgcgggg

SEQ ID NO: 1486 - DNA, 41 bp, Homo sapiens
actcgtttgcagattttacayttgttttcttgttgacacac

SEQ ID NO: 1487 - DNA, 41 bp, Homo sapiens
  misc_feature (21)..(21): t is present or absent.
gcgtttatactttttttttttaaccaaaaacacattatttg

SEQ ID NO: 1488 - DNA, 41 bp, Homo sapiens
agggccggggcccaggcttcygtaggcatcagtatgatggt

SEQ ID NO: 1489 - DNA, 41 bp, Homo sapiens
caaattcacaactgtgccttscacagaatgggttggaaaac

SEQ ID NO: 1490 - DNA, 41 bp, Homo sapiens
ccccactccacttgggtgagrgcaggtggatggtgatgggt

SEQ ID NO: 1491 - DNA, 41 bp, Homo sapiens
tacctcagggcactcagacascctcaccaatcagaggctca

SEQ ID NO: 1492 - DNA, 41 bp, Homo sapiens
tccttttcctgttttttgttkttttttttttcttggagtgg

SEQ ID NO: 1493 - DNA, 41 bp, Homo sapiens
cattggtttttagtgtattcwgtgttgtgcatccatcatca

SEQ ID NO: 1494 - DNA, 42 bp, Homo sapiens
tgtggtttagagctttctctttgagacatttttgctaaggtt

SEQ ID NO: 1495 - DNA, 40 bp, Homo sapiens
tgtggtttagagctttctctgagacatttttgctaaggtt

SEQ ID NO: 1496 - DNA, 41 bp, Homo sapiens
agctgaagtgaattaagcacratcaactcagtactcacact

SEQ ID NO: 1497 - DNA, 52 bp, Homo sapiens
  misc_feature (30)..(32): t is present or absent.
agggggaaagtttaaaggtattttttttttttgtcttgttatgtttttaagt

SEQ ID NO: 1498 - DNA, 41 bp, Homo sapiens
agagggtttcccaagcacacyctgtgtttggggttattgct

SEQ ID NO: 1499 - DNA, 41 bp, Homo sapiens
  misc_feature (21)..(21): a is present or absent.
aaatatagatgcaaaaaaaaatgagctgtggatgcatgttt

SEQ ID NO: 1500 - DNA, 41 bp, Homo sapiens
aatttcagtttttaggtcacycaagccagtgggagtcacat

SEQ ID NO: 1501 - DNA, 53 bp, Homo sapiens
  misc_feature (31)..(33): a is present or absent.
aaagacgttttaagggctttaaaaaaaaaaaaagaaagaaaagaaaactgtag

SEQ ID NO: 1502 - DNA, 41 bp, Homo sapiens
ggtttcccaacatctcatctrataaaaaaaataatttgcca

SEQ ID NO: 1503 - DNA, 41 bp, Homo sapiens
aaagagaataggttagtggaytagtattcctgtgcttaatg

SEQ ID NO: 1504 - DNA, 42 bp, Homo sapiens
  misc_feature (21)..(22): ct is present or absent.
aagagatggtctctagccccctgtttgatttggggcacttac

SEQ ID NO: 1505 - DNA, 41 bp, Homo sapiens
gtttggctactttgattaaaraagaaagaagagataataat

SEQ ID NO: 1506 - DNA, 41 bp, Homo sapiens
cctgcatctattctgacctayactggggaaaacagtatgtg

SEQ ID NO: 1507 - DNA, 69 bp, Homo sapiens
tattttgtagttcaaaaagtcagatcttcttcagctaatttagaaatgttgctgtccatttgatattca

SEQ ID NO: 1508 - DNA, 40 bp, Homo sapiens
tattttgtagttcaaaaagttgctgtccatttgatattca

SEQ ID NO: 1509 - DNA, 41 bp, Homo sapiens
agccacacgtttcttattgcrtgggaagtttaaaaaatggg

SEQ ID NO: 1510 - DNA, 41 bp, Homo sapiens
agtgaacctgagattgagctrtactgaaatctctagaagag

SEQ ID NO: 1511 - DNA, 41 bp, Homo sapiens
aaagggtggtctttaaatccytatgtttttctcatcaggtt

SEQ ID NO: 1512 - DNA, 41 bp, Homo sapiens
tttctcatcaggttacaagaygagaagaaaggtgatggcgt

SEQ ID NO: 1513 - DNA, 41 bp, Homo sapiens
acaatttatagtatttctcartgccccacacagtttatcta

SEQ ID NO: 1514 - DNA, 41 bp, Homo sapiens
gtagatgagtagctaaaaackaaagtcagctcctgaaataa

SEQ ID NO: 1515 - DNA, 41 bp, Homo sapiens
ggcacaatgacagatgttttyattgactacgacgttgagtt

SEQ ID NO: 1516 - DNA, 41 bp, Homo sapiens
gggaggtgacccatgaatttyacttgagtatcatctccaag

SEQ ID NO: 1517 - DNA, 41 bp, Homo sapiens
agaagaggtaacagtaagcckcctgatttacagcacacatc

SEQ ID NO: 1518 - DNA, 41 bp, Homo sapiens
atttgcaggtgtgtttgtagsgggcagttgagtagcttgaa

SEQ ID NO: 1519 - DNA, 41 bp, Homo sapiens
aaaggattcagcaggcatgargaaagaaaagctttgcaaga

SEQ ID NO: 1520 - DNA, 41 bp, Homo sapiens
ccattggctaatagcaatgamctatgacatggtctaactta

SEQ ID NO: 1521 - DNA, 41 bp, Homo sapiens
tcaatgatgttacagtgagamtctaatattgtattaaaccc

SEQ ID NO: 1522 - DNA, 41 bp, Homo sapiens
ctaatattgtattaaacccawgccacatgttaaatgaatct

SEQ ID NO: 1523 - DNA, 41 bp, Homo sapiens
gtgtccaagtttacggactaygagctgaaggcctatgccaa

SEQ ID NO: 1524 - DNA, 41 bp, Homo sapiens
caccttggtctgtggcctccrgaggaagtacttgttcaaga

SEQ ID NO: 1525 - DNA, 41 bp, Homo sapiens
taatcattccaaaccacggamtttatttcattaagaacatg

SEQ ID NO: 1526 - DNA, 41 bp, Homo sapiens
tcattccaaaccacggacttwatttcattaagaacatgata

SEQ ID NO: 1527 - DNA, 41 bp, Homo sapiens
tttacagattggaaaagccaytgaagtattgcaggtccaga

SEQ ID NO: 1528 - DNA, 41 bp, Homo sapiens
agtgactgtaattagtatcasttgtgcacagagaaaaaatg

SEQ ID NO: 1529 - DNA, 41 bp, Homo sapiens
tgcagaaggttgttctttcaygaccttcctgagtttcagaa

SEQ ID NO: 1530 - DNA, 41 bp, Homo sapiens
gaattcattaataaaaataawcacataatggagcgtgacat

SEQ ID NO: 1531 - DNA, 41 bp, Homo sapiens
gggccactctttggcttggcratagactgtggccaatgaaa

SEQ ID NO: 1532 - DNA, 41 bp, Homo sapiens
gctatttggtaggaacatctrggcatgatcaggtagccttc

SEQ ID NO: 1533 - DNA, 41 bp, Homo sapiens
  misc_feature (21)..(21): a is present or absent.
gagtaatattcagtaaaaaaataaagtggtattttaaatca

SEQ ID NO: 1534 - DNA, 41 bp, Homo sapiens
tgtttccagtaatagggaatrgaggtgtctttctctgaaag

SEQ ID NO: 1535 - DNA, 41 bp, Homo sapiens
gataaatgacaaggcaattasaacaatcaggaagcacaggt

SEQ ID NO: 1536 - DNA, 41 bp, Homo sapiens
caaggcaattacaacaatcargaagcacaggttcttcccaa

SEQ ID NO: 1537 - DNA, 41 bp, Homo sapiens
cctcatccttgccaatgtttycttttactggtttttgatgg

SEQ ID NO: 1538 - DNA, 41 bp, Homo sapiens
tctaaatgacctcaacatggycattaaaccaggggaaatga

SEQ ID NO: 1539 - DNA, 41 bp, Homo sapiens
atggcagtatattgatcaaayagaaaggtgtagcatacatt

SEQ ID NO: 1540 - DNA, 41 bp, Homo sapiens
ttattggcctctattttttcctgcccattggtcaagtatga

SEQ ID NO: 1541 - DNA, 40 bp, Homo sapiens
ttattggcctctattttttctgcccattggtcaagtatga

SEQ ID NO: 1542 - DNA, 41 bp, Homo sapiens
catacattcctgggagaaacyaagaggtcatagaaggaaaa

SEQ ID NO: 1543 - DNA, 41 bp, Homo sapiens
cacaattatacacatttcttytcgtatgattcccaagtcat

SEQ ID NO: 1544 - DNA, 41 bp, Homo sapiens
tattgtgtcaaaaacaattcrttgtatatctccattctaag

SEQ ID NO: 1545 - DNA, 41 bp, Homo sapiens
cagcctttgcattatatttttgctgtgttgtctaacaggag

SEQ ID NO: 1546 - DNA, 40 bp, Homo sapiens
cagcctttgcattatattttgctgtgttgtctaacaggag

SEQ ID NO: 1547 - DNA, 41 bp, Homo sapiens
gctgtgttgtctaacaggagmaaagagacacggatttgctc

SEQ ID NO: 1548 - DNA, 41 bp, Homo sapiens
tgagatagatatttaggaccrtgaccaatttttattttggt

SEQ ID NO: 1549 - DNA, 41 bp, Homo sapiens
gtgaccaatttttattttggytgaaaaatcttatttgaagt

SEQ ID NO: 1550 - DNA, 41 bp, Homo sapiens
tattgattagacaataacccrtctggggaagggatatttct

SEQ ID NO: 1551 - DNA, 41 bp, Homo sapiens
ccttttctaatgtctgcacarcctatttaagaatattccca

SEQ ID NO: 1552 - DNA, 52 bp, Homo sapiens
  misc_feature (30)..(32): t is present or absent.
aaagtttagtgtttctatcattttttttttttgctacttctgatggacttct

SEQ ID NO: 1553 - DNA, 41 bp, Homo sapiens
tttctctccccaattcatggktttttggttagcttctcatc

SEQ ID NO: 1554 - DNA, 41 bp, Homo sapiens
tccccaattcatgggtttttkgttagcttctcatcttcttg

SEQ ID NO: 1555 - DNA, 41 bp, Homo sapiens
caattcatgggtttttggtttagcttctcatcttcttgggg

SEQ ID NO: 1556 - DNA, 40 bp, Homo sapiens
caattcatgggtttttggttagcttctcatcttcttgggg

SEQ ID NO: 1557 - DNA, 52 bp, Homo sapiens
ttagaaaggggacttcttttaaaaaaagaaaatctgtgtttagtgttcctct

SEQ ID NO: 1558 - DNA, 52 bp, Homo sapiens
ttagaaaggggacttcttttaaaaaaaaaaaatctgtgtttagtgttcctct

SEQ ID NO: 1559 - DNA, 50 bp, Homo sapiens
ttagaaaggggacttcttttaaaaaaaaaatctgtgtttagtgttcctct

SEQ ID NO: 1560 - DNA, 41 bp, Homo sapiens
tcagacttgggttttcctatytttcttcttgagaacaagtt

SEQ ID NO: 1561 - DNA, 41 bp, Homo sapiens
tgttaaaatatctcattgtayatgctgacggatttttcttg

SEQ ID NO: 1562 - DNA, 41 bp, Homo sapiens
ccttaagtctcctcctatcawgcaccttgttctcaccagct

SEQ ID NO: 1563 - DNA, 41 bp, Homo sapiens
  misc_feature (21)..(21): t is present or absent.
ctctctcttcctttctcagctctactatttcactgttggct

SEQ ID NO: 1564 - DNA, 41 bp, Homo sapiens
aatccccatatcctaccttakccatctcatccatgaatctt

SEQ ID NO: 1565 - DNA, 41 bp, Homo sapiens
atccccatatcctaccttagycatctcatccatgaatcttg

SEQ ID NO: 1566 - DNA, 41 bp, Homo sapiens
aatatgagttttctaggtatrtatctagcagtgtttcaagt

SEQ ID NO: 1567 - DNA, 41 bp, Homo sapiens
atatgagttttctaggtatayatctagcagtgtttcaagtc

SEQ ID NO: 1568 - DNA, 41 bp, Homo sapiens
ctctgaaagttagtgatacaycttatttgtgtttgaatcaa

SEQ ID NO: 1569 - DNA, 41 bp, Homo sapiens
atgtatgagatcaagtcaggrtcaaatattagacacccata

SEQ ID NO: 1570 - DNA, 41 bp, Homo sapiens
ggaccatcctgtggggcaatsgttccagaaaatgctggtat

SEQ ID NO: 1571 - DNA, 41 bp, Homo sapiens
ctcaccggtataaatacaacygtagcaaaggttttcttttt

SEQ ID NO: 1572 - DNA, 41 bp, Homo sapiens
tgcgtattccctcagttcagctttttattcaagccacagca

SEQ ID NO: 1573 - DNA, 40 bp, Homo sapiens
tgcgtattccctcagttcagtttttattcaagccacagca

SEQ ID NO: 1574 - DNA, 41 bp, Homo sapiens
  misc_feature (21)..(21): a is present or absent.
tggctaagttaaaaaaaaaaagagattcaactataattgct

SEQ ID NO: 1575 - DNA, 41 bp, Homo sapiens
  misc_feature (21)..(21): c is present or absent.
caagattcaatactgccccccagggggtgggtgaacagggc

SEQ ID NO: 1576 - DNA, 41 bp, Homo sapiens
ctgttcaatttcctctcgcayagtgattcattccacattcc

SEQ ID NO: 1577 - DNA, 41 bp, Homo sapiens
taattaatatcttgtccttgsggggtaaatgagggatggta

SEQ ID NO: 1578 - DNA, 41 bp, Homo sapiens
ttggggggtaaatgagggatrgtagcataaacacttctcaa

SEQ ID NO: 1579 - DNA, 41 bp, Homo sapiens
aaacaccacagaatgacataraactaaaggcggcaggaatc

SEQ ID NO: 1580 - DNA, 41 bp, Homo sapiens
gaaacattcacagtgcttgtwtgagaagacagtggttatta

SEQ ID NO: 1581 - DNA, 41 bp, Homo sapiens
gagcagctgaaggcaggtcakatgaaggctaggtggctgga

SEQ ID NO: 1582 - DNA, 41 bp, Homo sapiens
tccaaaacctctggatagtayatagaagtaggcaatccatt

SEQ ID NO: 1583 - DNA, 41 bp, Homo sapiens
cctatgggtggctcaggagcygtgacaccttcccaggttca

SEQ ID NO: 1584 - DNA, 41 bp, Homo sapiens
gaggactttgcacatagtagrtgctcagctatattgttggc

SEQ ID NO: 1585 - DNA, 41 bp, Homo sapiens
tttggaatctaaagactgggkcacgatgctagttgtgtgac

SEQ ID NO: 1586 - DNA, 41 bp, Homo sapiens
ttttggggtgtggggagaggrcccatagtagggagacagct

SEQ ID NO: 1587 - DNA, 41 bp, Homo sapiens
acctaagggtgtccatcctgraggagagcagtcctaggggg

SEQ ID NO: 1588 - DNA, 41 bp, Homo sapiens
ccctggtctcccttaactcaygctggactgttccctttggt

SEQ ID NO: 1589 - DNA, 41 bp, Homo sapiens
gcctgtgtactaagtctgcgsagctgaggttcccaccctac

SEQ ID NO: 1590 - DNA, 41 bp, Homo sapiens
atggtgtggtggtaggaccayggctggtcaccagaggctgt

SEQ ID NO: 1591 - DNA, 41 bp, Homo sapiens
aaaggctttcacatctaaaamgtgtctcctcattttctgtc

SEQ ID NO: 1592 - DNA, 41 bp, Homo sapiens
ggattacttacatatacaccrtgcgggggagctcaccacct

SEQ ID NO: 1593 - DNA, 41 bp, Homo sapiens
ctacccaccctatcctgataytccagcaggatggagggcag

SEQ ID NO: 1594 - DNA, 41 bp, Homo sapiens
acaagtgggaagagaaagctygggagggtaagtcctttgac

SEQ ID NO: 1595 - DNA, 41 bp, Homo sapiens
cccagggagccttagcttgcrgggagacaggacctgctcat

SEQ ID NO: 1596 - DNA, 43 bp, Homo sapiens
  misc_feature (21)..(23): cct is present or absent.
tgtctaagccaatccctcctcctaccctctgcttagcagggac

SEQ ID NO: 1597 - DNA, 41 bp, Homo sapiens
gcctgggttcctcctcctggyccctctatgccccctcccat

SEQ ID NO: 1598 - DNA, 42 bp, Homo sapiens
agctcttaagcatttccccctctttcctcagcaaatataacc

SEQ ID NO: 1599 - DNA, 40 bp, Homo sapiens
agctcttaagcatttccccctttcctcagcaaatataacc

SEQ ID NO: 1600 - DNA, 41 bp, Homo sapiens
tcctggtttctctactgcatrgccctgtaccctgagcacca

SEQ ID NO: 1601 - DNA, 41 bp, Homo sapiens
tgtaccctgagcaccagcatygttgtagagaggaggtccgc

SEQ ID NO: 1602 - DNA, 41 bp, Homo sapiens
agaaagttgtcaacaagaggytgatattttgtgtgctaact

SEQ ID NO: 1603 - DNA, 41 bp, Homo sapiens
tgtgggggtgaacagagctgrgacagctgggagagccagtt

SEQ ID NO: 1604 - DNA, 41 bp, Homo sapiens
cctttgcttgtggtcagacamcctgcctttctctctgggct

SEQ ID NO: 1605 - DNA, 41 bp, Homo sapiens
tcatatgtgagaatccccccmccacggggtatccagacaca

SEQ ID NO: 1606 - DNA, 41 bp, Homo sapiens
tcccattccaagaatgttctkgttgtgttgctggcagggat

SEQ ID NO: 1607 - DNA, 41 bp, Homo sapiens
tgtgcatcaaggagagcttcygcctctacccacctgtgccc

SEQ ID NO: 1608 - DNA, 41 bp, Homo sapiens
agtcggatgtggtcatgaackctctgtcactggcagtggtc

SEQ ID NO: 1609 - DNA, 41 bp, Homo sapiens
cctggtcaccaacctctgttytgcccacaggaagcctgatc

SEQ ID NO: 1610 - DNA, 41 bp, Homo sapiens
tgggctgggagatcagacagkgtgggggactgggagggtca

SEQ ID NO: 1611 - DNA, 41 bp, Homo sapiens
ccagatggctcaggctgtgamctccctgggcaccaccctcc

SEQ ID NO: 1612 - DNA, 41 bp, Homo sapiens
ctgggtgtggaggagttgggrccccctgccttcaggaggct

SEQ ID NO: 1613 - DNA, 41 bp, Homo sapiens
tctgtgtctcacagtcacgtrgtgctccaggcattcagggt

SEQ ID NO: 1614 - DNA, 41 bp, Homo sapiens
aggagggagctgtcttgggargagagtggcagaggcaaatg

SEQ ID NO: 1615 - DNA, 41 bp, Homo sapiens
cagtgcataaagcctctgatyctccttagagaaggagggac

SEQ ID NO: 1616 - DNA, 42 bp, Homo sapiens
  misc_feature (21)..(22): ca is present or absent.
ccaagcccctggcaacctcacagtgattcaggctgggccttt

SEQ ID NO: 1617 - DNA, 41 bp, Homo sapiens
tttaatcagtctctctctctytttcccattctaagtgctta

SEQ ID NO: 1618 - DNA, 41 bp, Homo sapiens
ccctgctctacctccggcacygcccgtccctgcctctccac

SEQ ID NO: 1619 - DNA, 41 bp, Homo sapiens
tccctggaggtccctgggccsttctctgggcctcaggatct

SEQ ID NO: 1620 - DNA, 41 bp, Homo sapiens
ggatctcaccgtccatcccgyctgccctgcaggatgtccca

SEQ ID NO: 1621 - DNA, 41 bp, Homo sapiens
gcctgtcctggctgggcctckggccagtggcagcatcccct

SEQ ID NO: 1622 - DNA, 41 bp, Homo sapiens
cggtgtttcccacaacccccragacggaactggttttgggg

SEQ ID NO: 1623 - DNA, 41 bp, Homo sapiens
ggcagagaagcagaggaggcrtcttactcattcctctgctt

SEQ ID NO: 1624 - DNA, 41 bp, Homo sapiens
gggccgtctcccacttccacyacacccgaaggcacctttct

SEQ ID NO: 1625 - DNA, 41 bp, Homo sapiens
gttctgactcagctggtggcyacctacccccagggctttaa

SEQ ID NO: 1626 - DNA, 41 bp, Homo sapiens
agactccaccccagcttgggwccctttccttgacccctgtg

SEQ ID NO: 1627 - DNA, 41 bp, Homo sapiens
cttcccatcgttggacgggcraggctgagcagggggaatgg

SEQ ID NO: 1628 - DNA, 41 bp, Homo sapiens
gctttagctttctccatgtcrcttttcctatcaaggtggcc

SEQ ID NO: 1629 - DNA, 41 bp, Homo sapiens
cgcttttcctatcaaggtggmcttttcctcatgatgtcaac

SEQ ID NO: 1630 - DNA, 41 bp, Homo sapiens
gcttttcctatcaaggtggcsttttcctcatgatgtcaacg

SEQ ID NO: 1631 - DNA, 41 bp, Homo sapiens
ccacctgtctaacctctgttsctgtttgctcatgtctgggg

SEQ ID NO: 1632 - DNA, 41 bp, Homo sapiens
ttgctcatgtctggggcgtgwctctacaatggctgttatat

SEQ ID NO: 1633 - DNA, 41 bp, Homo sapiens
agcattctgtagaatgctgarctgtgctcaggggttgcgga

SEQ ID NO: 1634 - DNA, 41 bp, Homo sapiens
tgttggatcgtgtaggaggcrtgtcaaggcatgctggaacc

SEQ ID NO: 1635 - DNA, 41 bp, Homo sapiens
gggtttgaactggtgggtgtkgtcagagctctgtaggggac

SEQ ID NO: 1636 - DNA, 41 bp, Homo sapiens
tgtgaaatgtcagatgaaagratttgaacttgattaagagg

SEQ ID NO: 1637 - DNA, 41 bp, Homo sapiens
ttccaagggaaattgccattkaattctcctgtaactcaggt

SEQ ID NO: 1638 - DNA, 41 bp, Homo sapiens
ggggtgggggttgggggggggttactgccttctctccagga

SEQ ID NO: 1639 - DNA, 40 bp, Homo sapiens
ggggtgggggttggggggggttactgccttctctccagga

SEQ ID NO: 1640 - DNA, 41 bp, Homo sapiens
ggtgctgtctaccttcgggtrctgaagcagcccagagaccc

SEQ ID NO: 1641 - DNA, 41 bp, Homo sapiens
ctctcctgggtcctgtaccaycttgcaaagcacccagaata

SEQ ID NO: 1642 - DNA, 41 bp, Homo sapiens
gaacccatcacaacccagctrtgtggccggaccctgaggtg

SEQ ID NO: 1643 - DNA, 41 bp, Homo sapiens
tggtccaagttccagctctcyttccctcacctcctctggag

SEQ ID NO: 1644 - DNA, 41 bp, Homo sapiens
gcatggggatccaggcacggwtacccccttctctattcctc

SEQ ID NO: 1645 - DNA, 41 bp, Homo sapiens
aagtgaagcctagaattaccmtaagaccctgttccacagtc

SEQ ID NO: 1646 - DNA, 41 bp, Homo sapiens
tgtgcgtgaatgttcatggcrgccctattcacagtagccaa

SEQ ID NO: 1647 - DNA, 41 bp, Homo sapiens
tagtgtactgtccttttataygaaatttccagaacaggcca

SEQ ID NO: 1648 - DNA, 41 bp, Homo sapiens
aaatgttccggacctagatastgacgaaggtagcacgacac

SEQ ID NO: 1649 - DNA, 41 bp, Homo sapiens
cattaatgcacctctgcgggkctcttgggcagggggttggg

SEQ ID NO: 1650 - DNA, 41 bp, Homo sapiens
ttagggacatgtcctgagtcyacactgctccccacaaacct

SEQ ID NO: 1651 - DNA, 41 bp, Homo sapiens
atccaggtctcacacagtgtyacttcctctcttggctttag

SEQ ID NO: 1652 - DNA, 41 bp, Homo sapiens
gagagcatgaattgggtcctrtgtctttctctccagattca

SEQ ID NO: 1653 - DNA, 41 bp, Homo sapiens
tgtgctgcctccagcgggtcrcgtgcccatgtgcagacagg

SEQ ID NO: 1654 - DNA, 41 bp, Homo sapiens
tcaagtctgctgtacggctaygtcttgtcacctgtatattt

SEQ ID NO: 1655 - DNA, 41 bp, Homo sapiens
aggtctgggacccagggtccstaagtgaactgtctgagaca

SEQ ID NO: 1656 - DNA, 41 bp, Homo sapiens
ttttgtggccatgtcaggacwtgtgaacacatgtcagtgtc

SEQ ID NO: 1657 - DNA, 41 bp, Homo sapiens
gggacagacagggtgtcctargtccttgtgaaggcattctg

SEQ ID NO: 1658 - DNA, 41 bp, Homo sapiens
cctgacatagctcctacgtgycatgttaggcagtgtcattg

SEQ ID NO: 1659 - DNA, 41 bp, Homo sapiens
gaggagttgttatacctgatygttgaaggactggtatgaat

SEQ ID NO: 1660 - DNA, 41 bp, Homo sapiens
ggtgcacgacttcacagatgmcgtcatccaggagcggcgcc

SEQ ID NO: 1661 - DNA, 41 bp, Homo sapiens
  misc_feature (21)..(21): t is present or absent.
caggttgccagtgatttttttctcagaaagttttcatcaag

SEQ ID NO: 1662 - DNA, 41 bp, Homo sapiens
gaccaagaagggtctaggagwgcaagatgggcttgggtttc

SEQ ID NO: 1663 - DNA, 41 bp, Homo sapiens
cctcaatgcaaggttgctgtmcaccctcgggtgctgaagca

SEQ ID NO: 1664 - DNA, 41 bp, Homo sapiens
taccaccttgcaaagcacccrgaataccaggagcgctgtcg

SEQ ID NO: 1665 - DNA, 41 bp, Homo sapiens
attgaatggtgagtgcaggtrctggtgccctgttcctgagc

SEQ ID NO: 1666 - DNA, 41 bp, Homo sapiens
ggtgccctgttcctgagcctstctcattggctctgttcccc

SEQ ID NO: 1667 - DNA, 41 bp, Homo sapiens
acccatcctgactgtctgggsaaaggttataggcccttagg

SEQ ID NO: 1668 - DNA, 41 bp, Homo sapiens
tccctaattcctacccttccrtccagtccagggatttataa

SEQ ID NO: 1669 - DNA, 41 bp, Homo sapiens
tcattcatccatccagtcctygttcagcaaatactctcata

SEQ ID NO: 1670 - DNA, 41 bp, Homo sapiens
ctcctgggtaggaagaggggmccctcaggcagggagcattg

SEQ ID NO: 1671 - DNA, 41 bp, Homo sapiens
gggcccctcaggcagggagcmttgtcctgactgcccccttc

SEQ ID NO: 1672 - DNA, 41 bp, Homo sapiens
ccctgaggtgcgggccccccstctctgtttttgtccattcc

SEQ ID NO: 1673 - DNA, 41 bp, Homo sapiens
gatcaggagaatccaacatcrcctccctccaagacacacac

SEQ ID NO: 1674 - DNA, 41 bp, Homo sapiens
caagacacacaccactgtctytccaaggctggcggactggg

SEQ ID NO: 1675 - DNA, 41 bp, Homo sapiens
cggcaacccttcttggtctckcctccaggtctatgacccct

SEQ ID NO: 1676 - DNA, 41 bp, Homo sapiens
ggcaacccttcttggtctcgyctccaggtctatgacccctt

SEQ ID NO: 1677 - DNA, 41 bp, Homo sapiens
gaaaaggcccacagagtaggrttgggttggtcctagaagga

SEQ ID NO: 1678 - DNA, 41 bp, Homo sapiens
gagctcggctaggctcgcagkatatgcaagcccacatgggg

SEQ ID NO: 1679 - DNA, 41 bp, Homo sapiens
tgggtgtcccaggccaggttmccggcttgatggggccagga

SEQ ID NO: 1680 - DNA, 41 bp, Homo sapiens
accatgtttacccatcattgktcctggagctccccagcccc

SEQ ID NO: 1681 - DNA, 41 bp, Homo sapiens
gtggcagcatccccgtggctkctcctgctggtggtcggggc

SEQ ID NO: 1682 - DNA, 41 bp, Homo sapiens
tacgcagcaggtattcaccaktatttccacattatccactg

SEQ ID NO: 1683 - DNA, 41 bp, Homo sapiens
acaccccctaccctcacatcrtgacacagctgggccagaag

SEQ ID NO: 1684 - DNA, 41 bp, Homo sapiens
tgccatctccaccctcccccrtgcaggggcatcttctttat

SEQ ID NO: 1685 - DNA, 41 bp, Homo sapiens
tgtggcacttccaccatatgytcattgccctcttgctccag

SEQ ID NO: 1686 - DNA, 41 bp, Homo sapiens
gccacagagaccatggctcargccccaaaatgctgagtgac

SEQ ID NO: 1687 - DNA, 41 bp, Homo sapiens
tatgcttgggtgttgcagaayatgttggaccatgtaggagc

SEQ ID NO: 1688 - DNA, 41 bp, Homo sapiens
ccggtcccctttatgcccccmaccctcctttcttcttctgc

SEQ ID NO: 1689 - DNA, 41 bp, Homo sapiens
aacatgggatggagtgggggkgtgggtgtggggagagcaaa

SEQ ID NO: 1690 - DNA, 45 bp, Homo sapiens
ggccatgacaccacggccaggccagtggcctctcctgggtcttgt

SEQ ID NO: 1691 - DNA, 40 bp, Homo sapiens
ggccatgacaccacggccagtggcctctcctgggtcttgt

SEQ ID NO: 1692 - DNA, 41 bp, Homo sapiens
tttatttccccactaacttgstatgcaagcttagtaaaatc

SEQ ID NO: 1693 - DNA, 41 bp, Homo sapiens
cttggagaattaacggcaaawaccgcaatgacttttggacc

SEQ ID NO: 1694 - DNA, 41 bp, Homo sapiens
ttctaagtacatttattctcytgcttttagctatgatctag

SEQ ID NO: 1695 - DNA, 41 bp, Homo sapiens
caggagggccgtgtatgctcyctggataattgttgggtgtt

SEQ ID NO: 1696 - DNA, 41 bp, Homo sapiens
acgtggtgctcccagacagcygagtcatccccaaaggtgcc

SEQ ID NO: 1697 - DNA, 41 bp, Homo sapiens
gggttgggggttccgggcctsgttcctggcgcagtggggcc

SEQ ID NO: 1698 - DNA, 41 bp, Homo sapiens
tgcagtcagaccttccacctyggcccccaggaactgcatcg

SEQ ID NO: 1699 - DNA, 41 bp, Homo sapiens
atcacctacctttgcaccaaytaccttttcagatttccggt

SEQ ID NO: 1700 - DNA, 41 bp, Homo sapiens
ctgtgttggcccctgtgcctsagtcccgcggatggccagta

SEQ ID NO: 1701 - DNA, 41 bp, Homo sapiens
ggcccctgtgcctcagtcccrcggatggccagtagggggcg

SEQ ID NO: 1702 - DNA, 41 bp, Homo sapiens
cattatttcttcagccaagtytgttgccattggagcagatg

SEQ ID NO: 1703 - DNA, 41 bp, Homo sapiens
gttctgagagtaactctgaaytttgcctgtttcacactgct

SEQ ID NO: 1704 - DNA, 41 bp, Homo sapiens
ccctttttatatccagaatasagcctaaacttctttctctg

SEQ ID NO: 1705 - DNA, 41 bp, Homo sapiens
taagtatgctatactatattygatagatatactatactata

SEQ ID NO: 1706 - DNA, 41 bp, Homo sapiens
caatgtgattaactgaatgcygcaaatatgcactgtatatg

SEQ ID NO: 1707 - DNA, 41 bp, Homo sapiens
caggcttttcagattggatcyccgtggcgtactatggatgc

SEQ ID NO: 1708 - DNA, 41 bp, Homo sapiens
taggccccttaacattgaackattctcaaatagtaatctgc

SEQ ID NO: 1709 - DNA, 41 bp, Homo sapiens
tgagtctcctagaatgatatrttaggtttattcaagcattt

SEQ ID NO: 1710 - DNA, 41 bp, Homo sapiens
agcagttagatgagtcagagmataatatagttgggggaggg

SEQ ID NO: 1711 - DNA, 41 bp, Homo sapiens
gaagccaatttaacataaacmaataccaagatcaggtttca

SEQ ID NO: 1712 - DNA, 41 bp, Homo sapiens
gcaagtatggttaatcaaagraccatttattactcaaatat

SEQ ID NO: 1713 - DNA, 41 bp, Homo sapiens
agatgacaagatttcttctawttcaaaaattccctagcaca

SEQ ID NO: 1714 - DNA, 41 bp, Homo sapiens
ttctctaaaacagatggatgmttatgtatttgttaaatgtg

SEQ ID NO: 1715 - DNA, 41 bp, Homo sapiens
caggaagccaaacacaaaggyttggtgtcaaacagtcaact

SEQ ID NO: 1716 - DNA, 41 bp, Homo sapiens
ttttgaattaaattcttataytgtaacttttaaacttttta

SEQ ID NO: 1717 - DNA, 41 bp, Homo sapiens
gcaaaagaaagtggtggaagmatactgtaccatgcaaaaaa

SEQ ID NO: 1718 - DNA, 41 bp, Homo sapiens
aatggaattctatgtttttttgttgtgattatttatctatc

SEQ ID NO: 1719 - DNA, 40 bp, Homo sapiens
aatggaattctatgttttttgttgtgattatttatctatc

SEQ ID NO: 1720 - DNA, 41 bp, Homo sapiens
tgatctagaatttagtttctrtaaatgaatagaatccagtg

SEQ ID NO: 1721 - DNA, 41 bp, Homo sapiens
aatcccacttattactctcckgagagcttcaagtgcctata

SEQ ID NO: 1722 - DNA, 41 bp, Homo sapiens
ttttaagtacaagttttggtyacagtgatttcttcttgtca

SEQ ID NO: 1723 - DNA, 41 bp, Homo sapiens
  misc_feature (21)..(21): c is present or absent.
aaattggtggctcatcctgcctggcccccttcctcctcctc

SEQ ID NO: 1724 - DNA, 41 bp, Homo sapiens
gaaggtagccctggccacctstgttgtggctccagccgatc

SEQ ID NO: 1725 - DNA, 41 bp, Homo sapiens
cctgtgttgtggctccagccratcctgtcgcccccccagtg

SEQ ID NO: 1726 - DNA, 41 bp, Homo sapiens
gctttcttatgaccttggtcmatttcccagttgtcttgttg

SEQ ID NO: 1727 - DNA, 41 bp, Homo sapiens
gagctgggctcagtttctccygggtcagggtgtgatgtcga

SEQ ID NO: 1728 - DNA, 41 bp, Homo sapiens
ggatatgatttctgcccctcytctgctgtgggtaaacagct

SEQ ID NO: 1729 - DNA, 42 bp, Homo sapiens
  misc_feature (21)..(22): tc is present or absent.
tctgctgtgggtaaacagcttctgtttcatgcatttactttt

SEQ ID NO: 1730 - DNA, 41 bp, Homo sapiens
ccaataagaatgtgcttgaakgtttcatgcatttaatttgt

SEQ ID NO: 1731 - DNA, 41 bp, Homo sapiens
ctgcctgtccacacccacagyagcttgcacatcatccccac

SEQ ID NO: 1732 - DNA, 41 bp, Homo sapiens
catgaatgactctgggaaagratcattcttagcaatggact

SEQ ID NO: 1733 - DNA, 41 bp, Homo sapiens
aaatggaatccaaacagcaasagacctcccctcaccggtca

SEQ ID NO: 1734 - DNA, 41 bp, Homo sapiens
actgagcttctgccaccggcygcctgccggccttcatgaga

SEQ ID NO: 1735 - DNA, 41 bp, Homo sapiens
tccgtgtggaaggcaccttcscccagcctcagtggctagga

SEQ ID NO: 1736 - DNA, 41 bp, Homo sapiens
aacctcaggcgctgcctcagscagggagccagcctggcccc

SEQ ID NO: 1737 - DNA, 41 bp, Homo sapiens
aagcacgcactgaacatggartgagtgagtgaacgaatgaa

SEQ ID NO: 1738 - DNA, 41 bp, Homo sapiens
tgcccaagaacctggtgagcyggccgggctgaggcgggcag

SEQ ID NO: 1739 - DNA, 41 bp, Homo sapiens
gccccttccggtcacccttcyccgctcgaggcctcagggcc

SEQ ID NO: 1740 - DNA, 42 bp, Homo sapiens
  misc_feature (21)..(22): ct is present or absent.
attctcctctctctctctctctggaccaggctgggagcagtc

SEQ ID NO: 1741 - DNA, 41 bp, Homo sapiens
cagaccctcatacgtgacccygctgccccccaggctcttag

SEQ ID NO: 1742 - DNA, 41 bp, Homo sapiens
gtagacagagctggactccakccttgggtgataagggatcc

SEQ ID NO: 1743 - DNA, 41 bp, Homo sapiens
gccagggtcacaagcagaggygggaggagccaaggggtttg

SEQ ID NO: 1744 - DNA, 41 bp, Homo sapiens
acctgcgtggcccccgactaygtcctatgcagccctgagat

SEQ ID NO: 1745 - DNA, 41 bp, Homo sapiens
tgcgggcattgctgggctgcrgcgtgtggccattgggggcc

SEQ ID NO: 1746 - DNA, 41 bp, Homo sapiens
ccagggctccagggctcagcrtgctaagatgaactcccatc

SEQ ID NO: 1747 - DNA, 41 bp, Homo sapiens
atgaactcccatcccaccacyggctatcctgaaaggctgta

SEQ ID NO: 1748 - DNA, 41 bp, Homo sapiens
gaccaaggtcgggggattctytgtgtcccacaggccctgag

SEQ ID NO: 1749 - DNA, 41 bp, Homo sapiens
cagccaggtgggggtgcggcygggctgggcagggtcaggag

SEQ ID NO: 1750 - DNA, 41 bp, Homo sapiens
caggagcccgcagtgggcagyacaagtggtggcagcagggg

SEQ ID NO: 1751 - DNA, 41 bp, Homo sapiens
tcaggactttgggatggtggwcctcttggctctgtctctgc

SEQ ID NO: 1752 - DNA, 41 bp, Homo sapiens
atcctgatggggctcaaggcrgcctcacgcacatcctgttc

SEQ ID NO: 1753 - DNA, 41 bp, Homo sapiens
gtgctgacccagaccagcagygggggcttctgtgggaacga

SEQ ID NO: 1754 - DNA, 41 bp, Homo sapiens
tcccaggcccccgagctgacmcttcttggtggccgtggccc

SEQ ID NO: 1755 - DNA, 41 bp, Homo sapiens
aggctccccaagcctgggtcyctcttgcccccacccactct

SEQ ID NO: 1756 - DNA, 41 bp, Homo sapiens
ccgcaatcgccgcgccgcctraggatgctgctggtggccat

SEQ ID NO: 1757 - DNA, 41 bp, Homo sapiens
cgctcccaaccatgagagccraggtgggaggcatgggaaac

SEQ ID NO: 1758 - DNA, 41 bp, Homo sapiens
ctcttccccatgctgctcatyctcctgggccccatccactc

SEQ ID NO: 1759 - DNA, 41 bp, Homo sapiens
caggggtggacctgagtttcrtctcctgtctctctggctga

SEQ ID NO: 1760 - DNA, 41 bp, Homo sapiens
cctggcaatacttacatctcrgtgatttgctttctgtgcat

SEQ ID NO: 1761 - DNA, 41 bp, Homo sapiens
caacaggactctggaccaagsccctggcgttgggtaacaat

SEQ ID NO: 1762 - DNA, 41 bp, Homo sapiens
agggaaggggatgtgtgcccrtggcccgtgggtcagggggc

SEQ ID NO: 1763 - DNA, 41 bp, Homo sapiens
atggctgcaggggccatgggyacggggcttgctcaggagag

SEQ ID NO: 1764 - DNA, 41 bp, Homo sapiens
tctgtggacagacaaggattsggtcgggggcaccagggctg

SEQ ID NO: 1765 - DNA, 41 bp, Homo sapiens
tatgacaggtccatcaggcckcaccttcctgtgtgtcttat

SEQ ID NO: 1766 - DNA, 41 bp, Homo sapiens
ctcagcatctgcccccacagkgcttttgcacacgttggttc

SEQ ID NO: 1767 - DNA, 41 bp, Homo sapiens
aaagaaccctccgagtccctsgtttagtcccagaagggagg

SEQ ID NO: 1768 - DNA, 41 bp, Homo sapiens
gccttcaactgagggcgcacrcggccggccgagttccgggc

SEQ ID NO: 1769 - DNA, 41 bp, Homo sapiens
ggacctgcataaggtgggccrtggagagtgggccccggcag

SEQ ID NO: 1770 - DNA, 41 bp, Homo sapiens
gggccgtggagagtgggcccsggcaggggctggagcagcgt

SEQ ID NO: 1771 - DNA, 41 bp, Homo sapiens
ttcactcctgaacactcacaagccaccctgtgatgcaggct

SEQ ID NO: 1772 - DNA, 40 bp, Homo sapiens
ttcactcctgaacactcacagccaccctgtgatgcaggct

SEQ ID NO: 1773 - DNA, 41 bp, Homo sapiens
gactacgctctcaagaacctkcaggcctggatgaaggatga

SEQ ID NO: 1774 - DNA, 41 bp, Homo sapiens
ctgcagcatcctaacctcacygtcgcgactcaaggctgccg

SEQ ID NO: 1775 - DNA, 41 bp, Homo sapiens
aatcacccccatggcaccccraccgtcactgagagggtgct

SEQ ID NO: 1776 - DNA, 41 bp, Homo sapiens
atgctggagcggaccagcagmggcagctttggaggcaatga

SEQ ID NO: 1777 - DNA, 41 bp, Homo sapiens
aggtgtcctcactcaccccaycctccccaattccagccctt

SEQ ID NO: 1778 - DNA, 41 bp, Homo sapiens
actgtgtggggtatggcgggrtggtggggagaatgtggtgt

SEQ ID NO: 1779 - DNA, 41 bp, Homo sapiens
cgcggatttcccggccagccsccgtttcctgtgttctgcag

SEQ ID NO: 1780 - DNA, 41 bp, Homo sapiens
tgcagcgttgacttgagcacragacagtgacagtggagagt

SEQ ID NO: 1781 - DNA, 41 bp, Homo sapiens
  misc_feature (21)..(21): a is present or absent.
gaatttttgagaaaaaaaaaatgttcctttagggttgcctt

SEQ ID NO: 1782 - DNA, 41 bp, Homo sapiens
tcaggaacaggaagtaaagargtttacatttctaaatttct

SEQ ID NO: 1783 - DNA, 41 bp, Homo sapiens
atcaaaaacacttgtctgatkatcgtgctctgaacctgcct

SEQ ID NO: 1784 - DNA, 41 bp, Homo sapiens
atgacgctgagtttggtgctrttcttttgtttttcttgcct

SEQ ID NO: 1785 - DNA, 41 bp, Homo sapiens
gggagaagtgagggacctacycttggcttctaatctttcat

SEQ ID NO: 1786 - DNA, 41 bp, Homo sapiens
ttgtcagagacatctttgatratccttacgtactatatcag

SEQ ID NO: 1787 - DNA, 41 bp, Homo sapiens
  misc_feature (21)..(21): t is present or absent.
ttagtagataactttttttttgtaaggatggagaataatag

SEQ ID NO: 1788 - DNA, 41 bp, Homo sapiens
catattcaattcttttatgtyctttagaccaaagaaaggca

SEQ ID NO: 1789 - DNA, 41 bp, Homo sapiens
taaacctttaagctcatcatyggaccatctattgaatttct

SEQ ID NO: 1790 - DNA, 41 bp, Homo sapiens
atttaaagtgaaagctatttytagttttaaaaattgagcag

SEQ ID NO: 1791 - DNA, 41 bp, Homo sapiens
  misc_feature (21)..(21): t is present or absent.
ctatttagcaaacttttttttgacagtgtataaagttttca

SEQ ID NO: 1792 - DNA, 41 bp, Homo sapiens
  misc_feature (21)..(21): g is present or absent.
gttttcaacaattgatattggaaggttggtagggcctagga

SEQ ID NO: 1793 - DNA, 41 bp, Homo sapiens
ccctcaaggagcttatagttwaggttgtacacaatcatgtc

SEQ ID NO: 1794 - DNA, 41 bp, Homo sapiens
tagaaaaaattgtaatgttaraaagcattactgttaggaca

SEQ ID NO: 1795 - DNA, 41 bp, Homo sapiens
agttcaagatgattttgtagsttcagggcctagttgactta

SEQ ID NO: 1796 - DNA, 41 bp, Homo sapiens
atgattttgtaggttcagggyctagttgacttagcatgcaa

SEQ ID NO: 1797 - DNA, 41 bp, Homo sapiens
agaaaagttgcacaaatagtmcaaagaattcccatgtacct

SEQ ID NO: 1798 - DNA, 41 bp, Homo sapiens
attaaaatctgctttaaatayttttttgggggagaggacac

SEQ ID NO: 1799 - DNA, 41 bp, Homo sapiens
ccgatcttcaaaaaattagcygggggtggtggtgcacactg

SEQ ID NO: 1800 - DNA, 41 bp, Homo sapiens
  misc_feature (21)..(21): t is present or absent.
aaagttcacatttttttttttataacttcatggtcaagagc

SEQ ID NO: 1801 - DNA, 41 bp, Homo sapiens
  misc_feature (21)..(21): t is present or absent.
taatgcacacattttttttttcttcatagggacatccaacg

SEQ ID NO: 1802 - DNA, 41 bp, Homo sapiens
  misc_feature (21)..(21): a is present or absent.
aaaacaaaaaacaaaaaaaaaccttgttcctttataggttc

SEQ ID NO: 1803 - DNA, 41 bp, Homo sapiens
gggtgtggggaaactggcccycgccgcgcacttgtggactg

SEQ ID NO: 1804 - DNA, 41 bp, Homo sapiens
tgccgcgaagaaattggcacwgctgagttctacatgcagtt

SEQ ID NO: 1805 - DNA, 41 bp, Homo sapiens
ttctgtacatcaacttgtgawggattgaggccagttctggt

SEQ ID NO: 1806 - DNA, 41 bp, Homo sapiens
taccgctttgcccctgaccargggtaaattcttcaataact

SEQ ID NO: 1807 - DNA, 41 bp, Homo sapiens
aggcacttctgcacacacccrcgtctcatgcattttccctg

SEQ ID NO: 1808 - DNA, 41 bp, Homo sapiens
atgttgaagagattgctgatrttagacgttaggatttattt

SEQ ID NO: 1809 - DNA, 41 bp, Homo sapiens
tagaaaataagaggtttcagkttctctctgctaaatccggt

SEQ ID NO: 1810 - DNA, 41 bp, Homo sapiens
atcctgctttatacctgaacrtcttgcaggcagagccaaaa

SEQ ID NO: 1811 - DNA, 41 bp, Homo sapiens
aggcagagccaaaagccacarccaggagagtctgtaccgaa

SEQ ID NO: 1812 - DNA, 41 bp, Homo sapiens
attagttgtggcatatacttkttttaaaaaagttaaataat

SEQ ID NO: 1813 - DNA, 41 bp, Homo sapiens
aatcctgctttctggtatacygtacctgtagcttttgttat

SEQ ID NO: 1814 - DNA, 41 bp, Homo sapiens
aggctaatgaatggtaagagraaggggctatcctgattagc

SEQ ID NO: 1815 - DNA, 41 bp, Homo sapiens
  misc_feature (21)..(21): a is present or absent.
tgcttttctgatgttaatccacagggcattgctgaataaca

SEQ ID NO: 1816 - DNA, 41 bp, Homo sapiens
tttagaacatgacctgcctgyctctcccacatgtgagatga

SEQ ID NO: 1817 - DNA, 41 bp, Homo sapiens
ctcccacatgtgagatgactractcagctttttatttctcc

SEQ ID NO: 1818 - DNA, 41 bp, Homo sapiens
tgttttcatttttaaaaaaakgtttgactttggaattcatg

SEQ ID NO: 1819 - DNA, 42 bp, Homo sapiens
  misc_feature (21)..(22): ca is present or absent.
ttggcttgtctactaatacacatctgcttcaaaatgaacata

SEQ ID NO: 1820 - DNA, 41 bp, Homo sapiens
  misc_feature (21)..(21): t is present or absent.
gtatttgtcaactttttttttctcattttaaaattcttagc

SEQ ID NO: 1821 - DNA, 41 bp, Homo sapiens
gtgtgttgggggtggtggttrgtagctatagtaaataggtt

SEQ ID NO: 1822 - DNA, 41 bp, Homo sapiens
aaaagcacgtgggaaacacarttaatcatgtcttaccgtat

SEQ ID NO: 1823 - DNA, 41 bp, Homo sapiens
gctaaaacactccaaagcctkccttaaaaatgcgcactggg

SEQ ID NO: 1824 - DNA, 41 bp, Homo sapiens
  misc_feature (21)..(21): t is present or absent.
cctccttgcagatttttttttctctttcagtacgtgtccta

SEQ ID NO: 1825 - DNA, 41 bp, Homo sapiens
tagcagggaccccagcgcccsagagaccatgcagaggtcgc

SEQ ID NO: 1826 - DNA, 41 bp, Homo sapiens
ctatgtgagacgttaagaagrtagaggtggccaagaaggaa

SEQ ID NO: 1827 - DNA, 41 bp, Homo sapiens
agttctctttcttagcatggmctacagaggtgcaactacct

SEQ ID NO: 1828 - DNA, 41 bp, Homo sapiens
gaaacttaaatcttgagtcayacaattgtgtctacatactg

SEQ ID NO: 1829 - DNA, 41 bp, Homo sapiens
  misc_feature (21)..(21): t is present or absent.
attacacagtattttttttttaattttggggaaagtcgatt

SEQ ID NO: 1830 - DNA, 41 bp, Homo sapiens
  misc_feature (21)..(21): c is present or absent.
gccaggcagattcctgactcctataacccagagcttatcag

SEQ ID NO: 1831 - DNA, 41 bp, Homo sapiens
taacccagagcttatcagagsatttatgtccccaaagagaa

SEQ ID NO: 1832 - DNA, 41 bp, Homo sapiens
cagaataacaatgatggctcrgaaaaatatgggtatttctg

SEQ ID NO: 1833 - DNA, 41 bp, Homo sapiens
acgttttgacagttgcacaastttctttctttaagctttaa

SEQ ID NO: 1834 - DNA, 41 bp, Homo sapiens
aatatttttgaaaatcactasggtatcctgcatagtgattt

SEQ ID NO: 1835 - DNA, 41 bp, Homo sapiens
gaaaaatttcagttcatacamccccatgaaaaatacattta

SEQ ID NO: 1836 - DNA, 41 bp, Homo sapiens
acttatcttaacaaagatgastacacttaggcccagaatgt

SEQ ID NO: 1837 - DNA, 41 bp, Homo sapiens
caaagatgagtacacttaggyccagaatgttctctaatgct

SEQ ID NO: 1838 - DNA, 41 bp, Homo sapiens
  misc_feature (21)..(21): a is present or absent.
tttttccaaataaaaaaaaaatcaggtgatatctgtaaatg

SEQ ID NO: 1839 - DNA, 41 bp, Homo sapiens
tattaaagaacatgatgcttraaacagattagggaaaacta

SEQ ID NO: 1840 - DNA, 41 bp, Homo sapiens
  misc_feature (21)..(21): t is present or absent.
ctctgttgtagttttttttttctcctaatcatgttatcatt

SEQ ID NO: 1841 - DNA, 41 bp, Homo sapiens
ttatgttcagcaagaagagtrtaatatatgattgttaatga

SEQ ID NO: 1842 - DNA, 41 bp, Homo sapiens
tgtccagacaagagaccaaaytgccgaggcatcatttaggt

SEQ ID NO: 1843 - DNA, 41 bp, Homo sapiens
tttcaatctgaacattttacrtaagtgaagactttgttaga

SEQ ID NO: 1844 - DNA, 41 bp, Homo sapiens
aaagttaggtggtattgtatytgtcttcctttctcaatgtt

SEQ ID NO: 1845 - DNA, 41 bp, Homo sapiens
aatacaaacaaacttgagctytgcctatacttttcaagaat

SEQ ID NO: 1846 - DNA, 41 bp, Homo sapiens
tatctaagttttggagtcaartagcactttgtttgaatccc

SEQ ID NO: 1847 - DNA, 44 bp, Homo sapiens
  misc_feature (21)..(24): gatt is present or absent.
gattgattgattgattgattgatttacagagatcagagagctgg

SEQ ID NO: 1848 - DNA, 41 bp, Homo sapiens
gtagcaatgagaccattttttcttcagttgagctccatgtt

SEQ ID NO: 1849 - DNA, 40 bp, Homo sapiens
gtagcaatgagaccatttttcttcagttgagctccatgtt

SEQ ID NO: 1850 - DNA, 41 bp, Homo sapiens
gaatgtttggttgtaacctgyataatctggcatgaaattgt

SEQ ID NO: 1851 - DNA, 41 bp, Homo sapiens
catgctctcttctcagtcccrttccttcattatatcaccta

SEQ ID NO: 1852 - DNA, 41 bp, Homo sapiens
tatggccaagacttcagtatrcgtggacttaattcttcctt

SEQ ID NO: 1853 - DNA, 41 bp, Homo sapiens
  misc_feature (21)..(21): t is present or absent.
atgaagacattcattttttttctccgtccaatgttggatta

SEQ ID NO: 1854 - DNA, 42 bp, Homo sapiens
  misc_feature (21)..(21): g is present or absent.
  misc_feature (22)..(22): t is present or absent.
gtgtgtgtgtgtgtgtgtgtgtttttttaacagggatttggg

SEQ ID NO: 1855 - DNA, 40 bp, Homo sapiens
gtgtgtgtgtgtgtgtgtgtttttttaacagggatttggg

SEQ ID NO: 1856 - DNA, 41 bp, Homo sapiens
gaacactttatagtttttttkggacaaaagatctagctaaa

SEQ ID NO: 1857 - DNA, 41 bp, Homo sapiens
  misc_feature (21)..(21): a is present or absent.
tttttcttcaagaaattagaagaggggagaaattggtttaa

SEQ ID NO: 1858 - DNA, 41 bp, Homo sapiens
  misc_feature (21)..(21): a is present or absent.
tgaatcaaaatcatctaaaaagctttcagaaaccagacttt

SEQ ID NO: 1859 - DNA, 41 bp, Homo sapiens
atattaaacagagttacatayacttacaacttcatacatat

SEQ ID NO: 1860 - DNA, 41 bp, Homo sapiens
gtgtggatagtaaatgccagrgtaaatcacatagcatctaa

SEQ ID NO: 1861 - DNA, 41 bp, Homo sapiens
atggaagagaagttttagtaraggggaggaaggaggaggtg

SEQ ID NO: 1862 - DNA, 41 bp, Homo sapiens
  misc_feature (21)..(21): t is present or absent.
gagagagacttttttttttttaaggcgagagtttactacct

SEQ ID NO: 1863 - DNA, 41 bp, Homo sapiens
gtattaactcaaatctgatcwgccctactgggccaggattc

SEQ ID NO: 1864 - DNA, 41 bp, Homo sapiens
tttgcagtatcattgccttgygatatatattactttaatta

SEQ ID NO: 1865 - DNA, 41 bp, Homo sapiens
  misc_feature (21)..(22): at is present or absent.
atacatatatatgcacacacataatatgtatatatacacat

SEQ ID NO: 1866 - DNA, 41 bp, Homo sapiens
taaatatgtatatatacacawgtatacatgtataagtatgc

SEQ ID NO: 1867 - DNA, 41 bp, Homo sapiens
ggaagtataaatttgtaaatmactgagacccaaacttacaa

SEQ ID NO: 1868 - DNA, 41 bp, Homo sapiens
tgctattgactaatagtaatwattttagggcagctttatga

SEQ ID NO: 1869 - DNA, 41 bp, Homo sapiens
tggtagttctatgtggaaacmgtgaggaaataattttatat

SEQ ID NO: 1870 - DNA, 41 bp, Homo sapiens
caaaaaggtatggaagtcagmggagaaggagacccctatgt

SEQ ID NO: 1871 - DNA, 41 bp, Homo sapiens
  misc_feature (21)..(21): a is present or absent.
aagtatgcaaaaaaaaaaaaagaaataaatcactgacacac

SEQ ID NO: 1872 - DNA, 41 bp, Homo sapiens
cattaataaaataacaaatcrtatctattcaaagaatggca

SEQ ID NO: 1873 - DNA, 41 bp, Homo sapiens
tgacatttgtgatatgattaytctaatttagtctttttcag

SEQ ID NO: 1874 - DNA, 41 bp, Homo sapiens
  misc_feature (21)..(21): t is present or absent.
ttacctttaacttttttttttagtttgatcagctctcttta

SEQ ID NO: 1875 - DNA, 41 bp, Homo sapiens
atgcttttggagttgggtctyataaatgtatagaaatgttt

SEQ ID NO: 1876 - DNA, 41 bp, Homo sapiens
atgtggaacaatcatgactayatgccttttactttctctat

SEQ ID NO: 1877 - DNA, 42 bp, Homo sapiens
  misc_feature (21)..(22): at is present or absent.
agaatcaatattaaacacacatgttttattatatggagtcat

SEQ ID NO: 1878 - DNA, 41 bp, Homo sapiens
  misc_feature (21)..(21): a is present or absent.
ctgtcctaaagtttaaaaagaaaaaaaaaaggaagaaggaa

SEQ ID NO: 1879 - DNA, 54 bp, Homo sapiens
  misc_feature (33)..(34): t is present or absent.
cctttacaaactcttagacattttttttttttttagtttaacatgttacaaaac

SEQ ID NO: 1880 - DNA, 41 bp, Homo sapiens
actcttcccccttgtcaacayatgatgaagcttttaaatac

SEQ ID NO: 1881 - DNA, 41 bp, Homo sapiens
gggtgaagctctttccccacyggaactcaagcaagtgcaag

SEQ ID NO: 1882 - DNA, 41 bp, Homo sapiens
  misc_feature (21)..(21): t is present or absent.
ggatgaattaagtttttttttaaaaaagaaacatttggtaa

SEQ ID NO: 1883 - DNA, 41 bp, Homo sapiens
aaaggggctgaaggggtcttycttttgtgttcccctgactg

SEQ ID NO: 1884 - DNA, 43 bp, Homo sapiens
  misc_feature (21)..(23): cac is present or absent.
caccccaccaccaccaccaccacaaggtaacgttctgccccac

SEQ ID NO: 1885 - DNA, 41 bp, Homo sapiens
agcctgggcaacatagtgagrccccccccgccctttctaca

SEQ ID NO: 1886 - DNA, 41 bp, Homo sapiens
aggaggactgtgaatcccagmctgcatgtttgggtcggatt

SEQ ID NO: 1887 - DNA, 41 bp, Homo sapiens
catctcactaaggaagaatcyagtaaccagcaaggatgaga

SEQ ID NO: 1888 - DNA, 41 bp, Homo sapiens
cccagactgcactcctgcagygctgcctggctcctgtagtt

SEQ ID NO: 1889 - DNA, 41 bp, Homo sapiens
tttcagagctgtctggaaatwtagggggcaggtgggagggg

SEQ ID NO: 1890 - DNA, 41 bp, Homo sapiens
ccctacccctagcccaggggyccccacatgagtatgaatgg

SEQ ID NO: 1891 - DNA, 43 bp, Homo sapiens
agagaacccttcattaaccaccagggcgtggctgaccagtgtc

SEQ ID NO: 1892 - DNA, 40 bp, Homo sapiens
agagaacccttcattaaccagggcgtggctgaccagtgtc

SEQ ID NO: 1893 - DNA, 41 bp, Homo sapiens
taaagcacaagttatcacccrtggatggatttgtccttttc

SEQ ID NO: 1894 - DNA, 41 bp, Homo sapiens
ttatctccccttgaaaggacrctccacagagccagaaattc

SEQ ID NO: 1895 - DNA, 41 bp, Homo sapiens
cagagccagaaattctagaasagggaaaagtggaggggagg

SEQ ID NO: 1896 - DNA, 41 bp, Homo sapiens
ctgtgaactgcagggacagarggaaatgggtattgggagaa

SEQ ID NO: 1897 - DNA, 41 bp, Homo sapiens
tgaactgcagggacagaaggmaatgggtattgggagaatgg

SEQ ID NO: 1898 - DNA, 41 bp, Homo sapiens
gacagaaggaaatgggtattrggagaatggccagccctcca

SEQ ID NO: 1899 - DNA, 41 bp, Homo sapiens
tgggtattgggagaatggccrgccctccaaggggctgatgt

SEQ ID NO: 1900 - DNA, 41 bp, Homo sapiens
ggggacagccttcagctgtgraattcctccagtcctagaga

SEQ ID NO: 1901 - DNA, 41 bp, Homo sapiens
cattattccagtcctgaggcrtgagagcagaaggccgatgc

SEQ ID NO: 1902 - DNA, 41 bp, Homo sapiens
ccgatgcttctgccctccatsctaatgtcctcctgcaggga

SEQ ID NO: 1903 - DNA, 41 bp, Homo sapiens
ccatcctaatgtcctcctgcmgggacccaaggtggatggca

SEQ ID NO: 1904 - DNA, 41 bp, Homo sapiens
ggtgagggtaagcaggccacytgggccagggtggggtggga

SEQ ID NO: 1905 - DNA, 41 bp, Homo sapiens
agacactgcatctggcccacrtgtgctctaccccagggtcc

SEQ ID NO: 1906 - DNA, 41 bp, Homo sapiens
cacgtgtgctctaccccaggstcccagagggagaggggggt

SEQ ID NO: 1907 - DNA, 41 bp, Homo sapiens
gttcgctgaggttggcggatractttccgtagaaagggaag

SEQ ID NO: 1908 - DNA, 41 bp, Homo sapiens
tgtattcatatcgtcacgctsgtaaatgaatgagtaagtgt

SEQ ID NO: 1909 - DNA, 41 bp, Homo sapiens
ggcattaggtcaaaatcctgrtgggacaaaaggggaaactg

SEQ ID NO: 1910 - DNA, 41 bp, Homo sapiens
tctgtagaaagtacatggggrcatgaagatcattggcttga

SEQ ID NO: 1911 - DNA, 41 bp, Homo sapiens
gattcccagggaatgttaaamaggaccgggtcttcctaaac

SEQ ID NO: 1912 - DNA, 41 bp, Homo sapiens
tctgacccagtaccagccagsggggcaagtttccatccccc

SEQ ID NO: 1913 - DNA, 41 bp, Homo sapiens
gttgccatctgagatcttgcyggaagtacacaagagaccct

SEQ ID NO: 1914 - DNA, 41 bp, Homo sapiens
ttccactggccttttctgctyagtaattgctacattacagg

SEQ ID NO: 1915 - DNA, 41 bp, Homo sapiens
gaggaagctgcctcccggtgrggacaggaagcgggcatggc

SEQ ID NO: 1916 - DNA, 41 bp, Homo sapiens
cccaggagtccaacctccctktgtccagctagaccatggtg

SEQ ID NO: 1917 - DNA, 41 bp, Homo sapiens
cctgggacatgttttcttatrtaaacagcatcaaaagatgt

SEQ ID NO: 1918 - DNA, 41 bp, Homo sapiens
gcccgcccaggactcctcacstgtccaagtcacctagggag

SEQ ID NO: 1919 - DNA, 41 bp, Homo sapiens
  misc_feature (21)..(21): t is present or absent.
tccgaggatgtgtttttttttccctccgttagtcagcagtg

SEQ ID NO: 1920 - DNA, 41 bp, Homo sapiens
tcctgctcatatgcggcaccrtcagacttctgggcaggcaa

SEQ ID NO: 1921 - DNA, 41 bp, Homo sapiens
ggtattgattaaaagcctcaygggcagagaaattcgccatc

SEQ ID NO: 1922 - DNA, 41 bp, Homo sapiens
tgtgtattgtagaagtgatgrgaaatccagaacagaaagct

SEQ ID NO: 1923 - DNA, 41 bp, Homo sapiens
gccctctcatttcccttccartgctgagcgtttccagtgtg

SEQ ID NO: 1924 - DNA, 41 bp, Homo sapiens
gcctctgtccacagactttcrtgggccacgtcagcttcttc

SEQ ID NO: 1925 - DNA, 41 bp, Homo sapiens
accaagaatgaggccatcccktccccacgtggctgccccat

SEQ ID NO: 1926 - DNA, 41 bp, Homo sapiens
tgggttcaaagatggaatggkgcataactcagcaaaattat

SEQ ID NO: 1927 - DNA, 41 bp, Homo sapiens
gggagggaggctggacagggsatgaaggcagagcctggtgg

SEQ ID NO: 1928 - DNA, 41 bp, Homo sapiens
ggaggtgggacccaggatggygtttcttgggaccacaagga

SEQ ID NO: 1929 - DNA, 41 bp, Homo sapiens
actcccccggccccactcacrtctgccaccttccctccctg

SEQ ID NO: 1930 - DNA, 41 bp, Homo sapiens
actcattccaagtattgatcragaagagaggtaggtactgg

SEQ ID NO: 1931 - DNA, 41 bp, Homo sapiens
ttgaagatcttaagttgtttytggttcactcatttcgcaaa

SEQ ID NO: 1932 - DNA, 41 bp, Homo sapiens
agctaaaagcaaaacagcctytgacctggcaagcattccca

SEQ ID NO: 1933 - DNA, 41 bp, Homo sapiens
tgtcctacttttcttttgacscttataacttcctgacttcg

SEQ ID NO: 1934 - DNA, 41 bp, Homo sapiens
ccagctcctagtgggctggarggaaggacatgcggttgggg

SEQ ID NO: 1935 - DNA, 41 bp, Homo sapiens
ttgcaaactgagttagggccyggagagcttactgtgtgctg

SEQ ID NO: 1936 - DNA, 41 bp, Homo sapiens
tgcacttgccgcctacttatkccagacccaatgattgggtc

SEQ ID NO: 1937 - DNA, 41 bp, Homo sapiens
tatagattaatgaggctctgrgtccctcaaaaccttccctc

SEQ ID NO: 1938 - DNA, 41 bp, Homo sapiens
cccttacctctccaaaaaacrcttgagataccctagaggtg

SEQ ID NO: 1939 - DNA, 41 bp, Homo sapiens
ctcaggatcttcctggaggayatggttcactcccatgagag

SEQ ID NO: 1940 - DNA, 41 bp, Homo sapiens
actaagcagatttctaccaaytgcacctccccatccccttg

SEQ ID NO: 1941 - DNA, 41 bp, Homo sapiens
gaacaagcccctgagaatgcyttccgcaccccctactcccg

SEQ ID NO: 1942 - DNA, 41 bp, Homo sapiens
acaagcccctgagaatgcctyccgcaccccctactcccgcc

SEQ ID NO: 1943 - DNA, 41 bp, Homo sapiens
gcccttccatcgatcacccayacccagccatctcactcccc

SEQ ID NO: 1944 - DNA, 41 bp, Homo sapiens
tctcactccccaggtgcttayctgcactccagcctctccat

SEQ ID NO: 1945 - DNA, 41 bp, Homo sapiens
cataggggagagggcaggaayggagggaagggagagagccc

SEQ ID NO: 1946 - DNA, 41 bp, Homo sapiens
tagtatttaacctgcccaaaygctgtgtgaagtgctgacct

SEQ ID NO: 1947 - DNA, 41 bp, Homo sapiens
tcccctccacaagcttagacraacaggattctcctgtgact

SEQ ID NO: 1948 - DNA, 41 bp, Homo sapiens
tttggtgacagggcatcaacytgtctggtggtcaacgccag

SEQ ID NO: 1949 - DNA, 41 bp, Homo sapiens
  misc_feature (21)..(21): c is present or absent.
caaggatagcacaaatgacccattgcagacttcagatggag

SEQ ID NO: 1950 - DNA, 41 bp, Homo sapiens
gaaggtgggtatatccagggrtggccaagcagccacccctg

SEQ ID NO: 1951 - DNA, 41 bp, Homo sapiens
gttctgctagaacctgaactyataaaggtcttcctgtcctt

SEQ ID NO: 1952 - DNA, 41 bp, Homo sapiens
gtgagcgtctgcacatccaastaaagattgttttctcctcc

SEQ ID NO: 1953 - DNA, 41 bp, Homo sapiens
cgataagtgggtgtaatttgyccatccccacccatgagttc

SEQ ID NO: 1954 - DNA, 41 bp, Homo sapiens
cagctccctgccctcccctcrctctctctccctcagccagc

SEQ ID NO: 1955 - DNA, 41 bp, Homo sapiens
gacagctgctgagtcaggccragccggcagctgagaaaggc

SEQ ID NO: 1956 - DNA, 41 bp, Homo sapiens
cagctgagaaaggcggcagtsgtcagatgggcttgagaaac

SEQ ID NO: 1957 - DNA, 44 bp, Homo sapiens
  misc_feature (21)..(24): aaaa is present or absent.
cctccaaaaaataaaaacaaaaaacagaaatgaaggaaatagaa

SEQ ID NO: 1958 - DNA, 41 bp, Homo sapiens
tggggtaagcggaagacgggrttgaacgctttgagtttggt

SEQ ID NO: 1959 - DNA, 41 bp, Homo sapiens
ctcttagggatcttgtctaaktaaagaagagcagagcaaag

SEQ ID NO: 1960 - DNA, 41 bp, Homo sapiens
cagatcccagcttcctgtaarcagcctcagatcaggccaaa

SEQ ID NO: 1961 - DNA, 41 bp, Homo sapiens
gcgcctcacactcctataacrcgcacatgccctgatgcaca

SEQ ID NO: 1962 - DNA, 41 bp, Homo sapiens
atgccctgatgcacacacatyttcaacacgcacttactcta

SEQ ID NO: 1963 - DNA, 41 bp, Homo sapiens
agacacgtcaccctcccacaygtctccaccctgggggtgtg

SEQ ID NO: 1964 - DNA, 41 bp, Homo sapiens
tcagtcccctcagacacatgmcctctctccacgcagagaca

SEQ ID NO: 1965 - DNA, 41 bp, Homo sapiens
gcggccaaggagagtgatgayggcagcccaggttgatcaga

SEQ ID NO: 1966 - DNA, 41 bp, Homo sapiens
gctcctggggctccagccttygcagcccttgtgtgtgtctg

SEQ ID NO: 1967 - DNA, 41 bp, Homo sapiens
ggcttcgcagtcacctcgtgkccctccagggccgaggcctc

SEQ ID NO: 1968 - DNA, 41 bp, Homo sapiens
agggacctgggggcagacagygaggccacccttgtattgag

SEQ ID NO: 1969 - DNA, 41 bp, Homo sapiens
cccagggacaggactggcctsttgtggccgtcatcagtgca

SEQ ID NO: 1970 - DNA, 41 bp, Homo sapiens
  misc_feature (21)..(21): c is present or absent.
aggacattctggccacatgcctcatcctcctcctccaagcc

SEQ ID NO: 1971 - DNA, 41 bp, Homo sapiens
tggcccccaccgcgggtggtrttcccaccatcctgacccgc

SEQ ID NO: 1972 - DNA, 41 bp, Homo sapiens
tgttgtttctccttaaagagmtatttgtttttccccccaaa

SEQ ID NO: 1973 - DNA, 41 bp, Homo sapiens
gctggccttctggcttgcagwagttgtattttaagaatcag

SEQ ID NO: 1974 - DNA, 41 bp, Homo sapiens
tgcagaagttgtattttaagratcagagctcttgtgaggag

SEQ ID NO: 1975 - DNA, 41 bp, Homo sapiens
ttctgtggaaatcagaggctstctaaaatattcctaatttt

SEQ ID NO: 1976 - DNA, 41 bp, Homo sapiens
tggacgcactcaacattttcragttattactccttcaactc

SEQ ID NO: 1977 - DNA, 41 bp, Homo sapiens
aggatatcatgaaacactgamtcttagtaaaaactatcttt

SEQ ID NO: 1978 - DNA, 41 bp, Homo sapiens
tactgtggaatttttcttgcmacagagatatgtatttttca

SEQ ID NO: 1979 - DNA, 41 bp, Homo sapiens
cagtggtagatgtgttttctrttgccatcatctacaaatat

SEQ ID NO: 1980 - DNA, 49 bp, Homo sapiens
  misc_feature (28)..(29): t is present or absent.
tatgagttgttcaaataggctttttttttcagagaattgaatgctttct

SEQ ID NO: 1981 - DNA, 41 bp, Homo sapiens
  misc_feature (21)..(21): a is present or absent.
tcagtcgtattcctactaaaacaaaattttgtaagttatgt

SEQ ID NO: 1982 - DNA, 41 bp, Homo sapiens
ctttttatttgctgcttaccrttttactaaggttggatata

SEQ ID NO: 1983 - DNA, 41 bp, Homo sapiens
cttttaataaatgcaaactgyacacctggtctataaaaaga

SEQ ID NO: 1984 - DNA, 41 bp, Homo sapiens
cctatagaatttttcttttcktttttctcaaaaaaattaaa

SEQ ID NO: 1985 - DNA, 41 bp, Homo sapiens
tttcttttttctcaaaaaaaytaaatgtttgttatttattt

SEQ ID NO: 1986 - DNA, 41 bp, Homo sapiens
ttctgtagatgaagcttaagwgctagatcttatttgaaaaa

SEQ ID NO: 1987 - DNA, 41 bp, Homo sapiens
tttttaacttattgtttgccktttcattttttaatagaaaa

SEQ ID NO: 1988 - DNA, 41 bp, Homo sapiens
cgaatttgctgcttttagagwaatctttgcaaataataaaa

SEQ ID NO: 1989 - DNA, 41 bp, Homo sapiens
atttttcttcttgtaagtatsagtgatagagctgactgcag

SEQ ID NO: 1990 - DNA, 41 bp, Homo sapiens
atttgtaagacttttaaaatragataattgtgctggtgtct

SEQ ID NO: 1991 - DNA, 41 bp, Homo sapiens
tgtgctggtgtctatatcttrctgagaaaactagaatttat

SEQ ID NO: 1992 - DNA, 41 bp, Homo sapiens
ataagtgctctcccagtgttrattggacttagagcattttc

SEQ ID NO: 1993 - DNA, 44 bp, Homo sapiens
  misc_feature (21)..(24): taac is present or absent.
caaaacagaataatgaaaagtaactattatctaaaataataaaa

SEQ ID NO: 1994 - DNA, 46 bp, Homo sapiens
aacatactctcctcctctctctctttaagtcaaaatatattagtat

SEQ ID NO: 1995 - DNA, 42 bp, Homo sapiens
aacatactctcctcctctctctaagtcaaaatatattagtat

SEQ ID NO: 1996 - DNA, 40 bp, Homo sapiens
aacatactctcctcctctctaagtcaaaatatattagtat

SEQ ID NO: 1997 - DNA, 41 bp, Homo sapiens
ttctgtgaaagtgtcccaaawtgtgcctttaaattgttttt

SEQ ID NO: 1998 - DNA, 41 bp, Homo sapiens
agtgtcacatgtattttttcyggtattcctatgtttatcaa

SEQ ID NO: 1999 - DNA, 41 bp, Homo sapiens
ctcatttcaaacttggctatytggactctccccaggcattg

SEQ ID NO: 2000 - DNA, 41 bp, Homo sapiens
atcccctagtgatgtacactragcttgcctccatctttcct

SEQ ID NO: 2001 - DNA, 41 bp, Homo sapiens
ctgatttatatattagctgaytttccaagttcagacatcta

SEQ ID NO: 2002 - DNA, 41 bp, Homo sapiens
  misc_feature (21)..(21): a is present or absent.
ttcttttacttcaatgtagcaccaaatcagaaggtgacatt

SEQ ID NO: 2003 - DNA, 41 bp, Homo sapiens
atcccactggatttaattacmttgtgtagcttgtacaacca

SEQ ID NO: 2004 - DNA, 41 bp, Homo sapiens
attttggaagagaaattatakaaccttccacaactgaattt

SEQ ID NO: 2005 - DNA, 41 bp, Homo sapiens
  misc_feature (21)..(21): t is present or absent.
aatcctggtgtttttttttttctttttcatttttcagtagg

SEQ ID NO: 2006 - DNA, 41 bp, Homo sapiens
aagtaactcaaggaaagatgrtttaacttgtgaaatcgtaa

SEQ ID NO: 2007 - DNA, 41 bp, Homo sapiens
ctcatagttcagaagagttcmgagcccaattcagaagagtt

SEQ ID NO: 2008 - DNA, 41 bp, Homo sapiens
  misc_feature (21)..(21): g is present or absent.
tgaacctataaaattctaatgccatctttggatgaggtgca

SEQ ID NO: 2009 - DNA, 41 bp, Homo sapiens
ccagggacaaaagaagatgaygtaaacttaaggattgggac

SEQ ID NO: 2010 - DNA, 41 bp, Homo sapiens
agcaagccaggaagaaagtcsattaagttgtatttagaaat

SEQ ID NO: 2011 - DNA, 48 bp, Homo sapiens
  misc_feature (21)..(28): aattagaa is present or absent.
atagccatgaaggataagaaaattagaatgccatttgttatgtttcag

SEQ ID NO: 2012 - DNA, 47 bp, Homo sapiens
  misc_feature (21)..(23): n is t.
  misc_feature (24)..(24): n is a or t.
  misc_feature (25)..(26): n is a.
  misc_feature (27)..(27): n is a or absent.
aactctttctcttcatctgcnnnnnnngcaagccttgaaggagagtg

SEQ ID NO: 2013 - DNA, 41 bp, Homo sapiens
gcatgcaaaataatgaagaaracaatcttgtctgacattga

SEQ ID NO: 2014 - DNA, 41 bp, Homo sapiens
aaatatttcagaatttggggrtgtagagcatttgccgtcat

SEQ ID NO: 2015 - DNA, 41 bp, Homo sapiens
  misc_feature (21)..(21): t is present or absent.
cttgtaagtctttttttttttaaagtaatgaaaatttctaa

SEQ ID NO: 2016 - DNA, 41 bp, Homo sapiens
agacaacactgcttttttgtrtgttcacaattcaacgacag

SEQ ID NO: 2017 - DNA, 41 bp, Homo sapiens
aactggctgaaaggaaaaaawtcatattgctgtaaatattt

SEQ ID NO: 2018 - DNA, 41 bp, Homo sapiens
tgcttttgctttccacttcartatccagaaaactctctcat

SEQ ID NO: 2019 - DNA, 41 bp, Homo sapiens
aacatggaactatagtaaatrtagtttttttggggttcaga

SEQ ID NO: 2020 - DNA, 41 bp, Homo sapiens
  misc_feature (21)..(21): t is present or absent.
aatttacacttttttttttttgcaggagaatattttgcaaa

SEQ ID NO: 2021 - DNA, 41 bp, Homo sapiens
aatggagctcatgcatgtgtkttcaaatatatacatgcaaa

SEQ ID NO: 2022 - DNA, 41 bp, Homo sapiens
tatttccttagccagcggtaycacagtgtgtttagtgaatt

SEQ ID NO: 2023 - DNA, 41 bp, Homo sapiens
tcacattgccttgacatcacmcctactgctcctccacccta

SEQ ID NO: 2024 - DNA, 41 bp, Homo sapiens
  misc_feature (21)..(21): g is present or absent.
agtcctgcaagggtgacaccgttatgccacaagcagttggg

SEQ ID NO: 2025 - DNA, 41 bp, Homo sapiens
  misc_feature (21)..(21): t is present or absent.
tgagtccttctgaagtcaaatatgcggggcactttttgaaa

SEQ ID NO: 2026 - DNA, 41 bp, Homo sapiens
tctgaagtcaaatatgcgggkcactttttgaaatccttgtt

SEQ ID NO: 2027 - DNA, 41 bp, Homo sapiens
aagggaatccctgagctgagmatgaccagcccagtggtttc

SEQ ID NO: 2028 - DNA, 41 bp, Homo sapiens
cctccctgaagtcctcagcamtcttagctggttcctcgccc

SEQ ID NO: 2029 - DNA, 41 bp, Homo sapiens
tgcttccaaggaagttcatckcagtattatttgtaattagc

SEQ ID NO: 2030 - DNA, 43 bp, Homo sapiens
  misc_feature (21)..(23): aaa is present or absent.
tgtaattagcaacaacaacaaaagaaaagaagctaaatattga

SEQ ID NO: 2031 - DNA, 41 bp, Homo sapiens
  misc_feature (21)..(21): a is present or absent.
ttatttgtccattaaagaaaactcaagcgcttagcctggca

SEQ ID NO: 2032 - DNA, 41 bp, Homo sapiens
gagaatatgggacaccccttkttcatcctctcatccagcat

SEQ ID NO: 2033 - DNA, 41 bp, Homo sapiens
tccttcttgcatttatttttrgctggatgtttttatgcctc

SEQ ID NO: 2034 - DNA, 41 bp, Homo sapiens
aaccagctcaatgggttaggraggacattgatcgtcatccc

SEQ ID NO: 2035 - DNA, 41 bp, Homo sapiens
gagtcaaggcagtcccctgaygggctgatcctttgctctgg

SEQ ID NO: 2036 - DNA, 41 bp, Homo sapiens
atggaaggtgtgtccattcamcctggccaagctgggaagaa

SEQ ID NO: 2037 - DNA, 41 bp, Homo sapiens
cagtattttagatggtaaagyattatgatgtaatatattgt

SEQ ID NO: 2038 - DNA, 41 bp, Homo sapiens
ttggcatgtcagggctgcaaractcatgtagaaatcactcc

SEQ ID NO: 2039 - DNA, 41 bp, Homo sapiens
cgctgagtgcatgaatagtcyaggcttgagggtgatgggag

SEQ ID NO: 2040 - DNA, 41 bp, Homo sapiens
taaggcatccaagccccttcrtaattggacactacctaccc

SEQ ID NO: 2041 - DNA, 41 bp, Homo sapiens
tctgtcatgacacttagcagkcagcccagcaggtgaaggtt

SEQ ID NO: 2042 - DNA, 41 bp, Homo sapiens
tgtggtcctgaaggtcctgcctgacatctctgctccccacc

SEQ ID NO: 2043 - DNA, 40 bp, Homo sapiens
tgtggtcctgaaggtcctgctgacatctctgctccccacc

SEQ ID NO: 2044 - DNA, 41 bp, Homo sapiens
gaggtgggcagagggtcagcycactactggattcctcagtc

SEQ ID NO: 2045 - DNA, 41 bp, Homo sapiens
ggagtagatctagcctggaakagcgagtgagtcactgaccc

SEQ ID NO: 2046 - DNA, 41 bp, Homo sapiens
gtagatctagcctggaatagygagtgagtcactgaccccac

SEQ ID NO: 2047 - DNA, 41 bp, Homo sapiens
ctcctgagcatgaactctccwcccctccactctgctgtcag

SEQ ID NO: 2048 - DNA, 41 bp, Homo sapiens
acttcttcatttcagctgtcstcttgcccagggacagtttc

SEQ ID NO: 2049 - DNA, 41 bp, Homo sapiens
cctccaaaatcaacaatccarttatcgcctgtctgctagtt

SEQ ID NO: 2050 - DNA, 41 bp, Homo sapiens
aggaactatccaaagagaaayacattcatatacttcgcagg

SEQ ID NO: 2051 - DNA, 41 bp, Homo sapiens
gtcgtgtaaactgaaaatctsaggagttgatggcttcaggc

SEQ ID NO: 2052 - DNA, 41 bp, Homo sapiens
atatagatatacgaattcacrgagtgatgcgggaagaacct

SEQ ID NO: 2053 - DNA, 41 bp, Homo sapiens
cgtgtttgtttctgaggcccmgagaggggtagtgactcacc

SEQ ID NO: 2054 - DNA, 41 bp, Homo sapiens
cctgatggcaacacatgagtygggctctctctaatctgtga

SEQ ID NO: 2055 - DNA, 41 bp, Homo sapiens
aaaaattattcatcaaaggtraaacctaaaattaagacatg

SEQ ID NO: 2056 - DNA, 41 bp, Homo sapiens
ccatggcgcatggccatgccrgtctatggtactggtctcac

SEQ ID NO: 2057 - DNA, 41 bp, Homo sapiens
cgcatggccatgccggtctayggtactggtctcaccctcag

SEQ ID NO: 2058 - DNA, 41 bp, Homo sapiens
gtgggctggagaagctgcatygctcacccggggctggtggt

SEQ ID NO: 2059 - DNA, 41 bp, Homo sapiens
gagaagctgcatcgctcaccmggggctggtggtcacttttt

SEQ ID NO: 2060 - DNA, 41 bp, Homo sapiens
ctagcaggtgccctgacacasctttgcacaggaaggggcag

SEQ ID NO: 2061 - DNA, 41 bp, Homo sapiens
gccctatgctctgcgtctgarctatatatagagttcccatc

SEQ ID NO: 2062 - DNA, 41 bp, Homo sapiens
ttctcatttgggatgctaagrttaaaaattagcataacact

SEQ ID NO: 2063 - DNA, 41 bp, Homo sapiens
catttgggatgctaagattamaaattagcataacacttcca

SEQ ID NO: 2064 - DNA, 41 bp, Homo sapiens
cattcacaaaagctctttctyctatggttggctctgagttt

SEQ ID NO: 2065 - DNA, 41 bp, Homo sapiens
caaatatttggctctaattcygcttccacctcagacagcta

SEQ ID NO: 2066 - DNA, 41 bp, Homo sapiens
gcgcctctgggcatctcactrtgcatgcttaggcgccttgc

SEQ ID NO: 2067 - DNA, 41 bp, Homo sapiens
gtgcatgcttaggcgccttgsggctctgttgtttttcagaa

SEQ ID NO: 2068 - DNA, 41 bp, Homo sapiens
aacggtgatgaaagaggcgaygtgagaaggaaggtggcttt

SEQ ID NO: 2069 - DNA, 41 bp, Homo sapiens
ttgcatggcacttactgaccrttgcacaggcctgcaacacc

SEQ ID NO: 2070 - DNA, 41 bp, Homo sapiens
atttctggattctgttagtaygtagaaagctctaaagcatg

SEQ ID NO: 2071 - DNA, 41 bp, Homo sapiens
aaatctgctgctgggagagasagcaaagcatgcagatcaac

SEQ ID NO: 2072 - DNA, 41 bp, Homo sapiens
  misc_feature (21)..(21): a is present or absent.
acagtgggctgatgcatagaacctgtagcaatccaccagca

SEQ ID NO: 2073 - DNA, 41 bp, Homo sapiens
tgtcactgaggtagttcgcaracattttactaagtcttcag

SEQ ID NO: 2074 - DNA, 41 bp, Homo sapiens
  misc_feature (21)..(21): a is present or absent.
aatgctaaaaaaaaaaaaaaatcactgtggtactttgggga

SEQ ID NO: 2075 - DNA, 41 bp, Homo sapiens
tgccatcataagcagaaactmtctctctcttcttggaagct

SEQ ID NO: 2076 - DNA, 41 bp, Homo sapiens
gtctagagtctttcaaagagwacacattctgagatttgagg

SEQ ID NO: 2077 - DNA, 41 bp, Homo sapiens
agcaccaccccattgcagggmtggaatgacagtaatgggcc

SEQ ID NO: 2078 - DNA, 41 bp, Homo sapiens
tgcccttcccaggaagatgtrtttctctgtcctcagccaca

SEQ ID NO: 2079 - DNA, 41 bp, Homo sapiens
ctgtcctcagccacatgaaartcttttgcctaccgtgcctg

SEQ ID NO: 2080 - DNA, 41 bp, Homo sapiens
agctcacgatcaagtcacagyttaactggacacattatttt

SEQ ID NO: 2081 - DNA, 41 bp, Homo sapiens
gcttaacaaccagcataaaaragagcagcatgggacacgct

SEQ ID NO: 2082 - DNA, 41 bp, Homo sapiens
caggactgtagctgctggccyaaaatgagcccattcctgtg

SEQ ID NO: 2083 - DNA, 41 bp, Homo sapiens
ccctctcaatctggcctttcsctggcatgggtgggcgactc

SEQ ID NO: 2084 - DNA, 41 bp, Homo sapiens
gctcccagggagatggagccrctcgggctgagggccttggc

SEQ ID NO: 2085 - DNA, 41 bp, Homo sapiens
ttctgtctggcacgcctcccratggctccccacctgctacc

SEQ ID NO: 2086 - DNA, 41 bp, Homo sapiens
ctccctggggtatgcctgtasgcagttaagcgtcaaggaca

SEQ ID NO: 2087 - DNA, 41 bp, Homo sapiens
atgccgctctggggaggggamgctgagcatgattttggaag

SEQ ID NO: 2088 - DNA, 41 bp, Homo sapiens
ctgagcatgattttggaagcyggcagaagaggctattgtga

SEQ ID NO: 2089 - DNA, 41 bp, Homo sapiens
tgcagcaaccgcccccgcccyccgccaaaaacaaacacact

SEQ ID NO: 2090 - DNA, 41 bp, Homo sapiens
tttacccctggaacaggcagrccaagctggctggtcccctc

SEQ ID NO: 2091 - DNA, 41 bp, Homo sapiens
aacaggcaggccaagctggcyggtcccctccctgatacaca

SEQ ID NO: 2092 - DNA, 41 bp, Homo sapiens
gtgtgtggctggtttcttagsaagcaccatggttccaagtt

SEQ ID NO: 2093 - DNA, 41 bp, Homo sapiens
gggagatgaacgtaagtggarggcaggcctacaaggttgca

SEQ ID NO: 2094 - DNA, 41 bp, Homo sapiens
ccactggatctgcttttggartcaagagtccttaagctcca

SEQ ID NO: 2095 - DNA, 41 bp, Homo sapiens
gatttttgttggctttgcaawggatcacagtcatttattca

SEQ ID NO: 2096 - DNA, 41 bp, Homo sapiens
tctgagcctctttccttaacygcagagtgagtggctacaga

SEQ ID NO: 2097 - DNA, 41 bp, Homo sapiens
cttaactgcagagtgagtggytacagagaaatctttactac

SEQ ID NO: 2098 - DNA, 41 bp, Homo sapiens
tcaagcagcagcagcaactgmgtggagtcttcttgaactaa

SEQ ID NO: 2099 - DNA, 41 bp, Homo sapiens
aacactcctatgcccctctcrgcacaaaatgacgtgtcccc

SEQ ID NO: 2100 - DNA, 41 bp, Homo sapiens
ccctctcggcacaaaatgacrtgtccccccttgcttcccct

SEQ ID NO: 2101 - DNA, 41 bp, Homo sapiens
cacccagcacagggactggcwcacatgagatgctcctgctt

SEQ ID NO: 2102 - DNA, 41 bp, Homo sapiens
tgttgagatccctaccatgcrggggaggaagttgcacaccc

SEQ ID NO: 2103 - DNA, 41 bp, Homo sapiens
agcatggagcactgagtgttyttgtggctttgctgagcccc

SEQ ID NO: 2104 - DNA, 41 bp, Homo sapiens
tgcttgggtggagtgaatcaytgtaggagaaaaactcagtt

SEQ ID NO: 2105 - DNA, 41 bp, Homo sapiens
tgaagtcaggtttacaaagtsaagtttacttcttgggagaa

SEQ ID NO: 2106 - DNA, 41 bp, Homo sapiens
tgaaaaccaatgacccctctyccaagaaaaatggccacata

SEQ ID NO: 2107 - DNA, 41 bp, Homo sapiens
ccttgggggagctcagtatgrttcttccaggagaagcctgc

SEQ ID NO: 2108 - DNA, 41 bp, Homo sapiens
gaaagttgggtttcatgtttygcactcacattatgagtgaa

SEQ ID NO: 2109 - DNA, 41 bp, Homo sapiens
ctagacattctcacagagccragggcagcaaggcggggctc

SEQ ID NO: 2110 - DNA, 41 bp, Homo sapiens
ttcacctctctccatggaccrgtctcccctgctcctcaatg

SEQ ID NO: 2111 - DNA, 41 bp, Homo sapiens
caaattcctgggaacaaatcrggttgacccagctttattct

SEQ ID NO: 2112 - DNA, 41 bp, Homo sapiens
acaaatcgggttgacccagckttattctccctgtcccatca

SEQ ID NO: 2113 - DNA, 41 bp, Homo sapiens
ggctgtcagagcctacctgcktgaatgggtggaagggcagg

SEQ ID NO: 2114 - DNA, 41 bp, Homo sapiens
ctgcgtgaatgggtggaaggrcaggtctcagagaattgggt

SEQ ID NO: 2115 - DNA, 41 bp, Homo sapiens
agacacacagagcatgggacygagaggcgagcagaccctgc

SEQ ID NO: 2116 - DNA, 41 bp, Homo sapiens
gagcagaccctgccaaaactrggagactgaatagatcgctc

SEQ ID NO: 2117 - DNA, 41 bp, Homo sapiens
cgtgcttctgcacagccaccygggaaggtatgccgatggtt

SEQ ID NO: 2118 - DNA, 41 bp, Homo sapiens
attctcagcagggaggattartggtaaaagcccaggaatgg

SEQ ID NO: 2119 - DNA, 41 bp, Homo sapiens
cccccagagccacagcagccstgtctcctgggtggtcttgt

SEQ ID NO: 2120 - DNA, 41 bp, Homo sapiens
agtataataaaagcaggagcyatagcccccaactctcaaga

SEQ ID NO: 2121 - DNA, 41 bp, Homo sapiens
aggggagtgacagtgggcacmactctcagggaacccattac

SEQ ID NO: 2122 - DNA, 41 bp, Homo sapiens
gcaccactctcagggaacccrttactgtgagagaagccact

SEQ ID NO: 2123 - DNA, 41 bp, Homo sapiens
agagaagccactgtgccactstgtggtcgaacttcaagacc

SEQ ID NO: 2124 - DNA, 41 bp, Homo sapiens
ggctgtccagcacacaggggmaggcctcttggccactgggg

SEQ ID NO: 2125 - DNA, 41 bp, Homo sapiens
aatcacttgccccaaggtcaycttaactgttaggtgttctt

SEQ ID NO: 2126 - DNA, 41 bp, Homo sapiens
acctctaggggctcccagagrccccaagaacagaaccttcc

SEQ ID NO: 2127 - DNA, 41 bp, Homo sapiens
cacccttgcagacctcagacrggtcctgggggcttgctttc

SEQ ID NO: 2128 - DNA, 41 bp, Homo sapiens
ccagaggagaaagctctgccrtagtcggcctcagttaacca

SEQ ID NO: 2129 - DNA, 41 bp, Homo sapiens
aggagaaagctctgccgtagycggcctcagttaaccacgga

SEQ ID NO: 2130 - DNA, 41 bp, Homo sapiens
gcaggcattaaaatgggactktgcctttattgctcctgggc

SEQ ID NO: 2131 - DNA, 41 bp, Homo sapiens
ttaaatgccaaatgagttctsattaacaaagaaagagggaa

SEQ ID NO: 2132 - DNA, 41 bp, Homo sapiens
ggaaaatctcagtaaaccacygtgacggcatctacccactt

SEQ ID NO: 2133 - DNA, 41 bp, Homo sapiens
ctttcgggtggatattgctaygtcaagtgtctgggaaagcc

SEQ ID NO: 2134 - DNA, 41 bp, Homo sapiens
ccactaatatgcattctttastaagcggtctcaatatacac

SEQ ID NO: 2135 - DNA, 41 bp, Homo sapiens
aaaaagcattttgctcttatraaagcacagcctcttttgag

SEQ ID NO: 2136 - DNA, 41 bp, Homo sapiens
cccagacaacccaagcagagrcctcttagggccggaatcat

SEQ ID NO: 2137 - DNA, 41 bp, Homo sapiens
agcacaggatcaaggcctaarggccccttagactgacctca

SEQ ID NO: 2138 - DNA, 41 bp, Homo sapiens
ttgccattttgatctgtgacytttttttccagaaatagttt

SEQ ID NO: 2139 - DNA, 41 bp, Homo sapiens
atggagggctccctcgggacyaggcagtattcagagatgta

SEQ ID NO: 2140 - DNA, 41 bp, Homo sapiens
aaacagcaattagaatcactytgaaatagtgatagtattta

SEQ ID NO: 2141 - DNA, 41 bp, Homo sapiens
aggagggggggagttttcaarcatataggagatcagactgt

SEQ ID NO: 2142 - DNA, 41 bp, Homo sapiens
tatacctacaaacatatatayatttaaaaaattgttttact

SEQ ID NO: 2143 - DNA, 41 bp, Homo sapiens
gatgtgggaaagttagagaasagcccattgtactaatgctc

SEQ ID NO: 2144 - DNA, 41 bp, Homo sapiens
aggcttcttgactgtctagayagcaagtctaatcatttgtg

SEQ ID NO: 2145 - DNA, 41 bp, Homo sapiens
gtaaacacggctgtgggatgyttttacaaacacaatatcgt

SEQ ID NO: 2146 - DNA, 41 bp, Homo sapiens
tgatgagcttgttattggtgrggtacagcctattaatttag

SEQ ID NO: 2147 - DNA, 41 bp, Homo sapiens
tcgtgtctctgtcttgatctytgtctggttttaggccaact

SEQ ID NO: 2148 - DNA, 41 bp, Homo sapiens
aacttttgaagaactggaacrcgttaggaagttggtcaaag

SEQ ID NO: 2149 - DNA, 41 bp, Homo sapiens
acttttgaagaactggaacgygttaggaagttggtcaaagc

SEQ ID NO: 2150 - DNA, 41 bp, Homo sapiens
ggcctggcacagatgaaataytattcagagttcacagtgta

SEQ ID NO: 2151 - DNA, 41 bp, Homo sapiens
cagtgtattttcatttcatartatatttgattttcaggtct

SEQ ID NO: 2152 - DNA, 41 bp, Homo sapiens
atcatgtaatgtactttagastcagatatataaatatttgt

SEQ ID NO: 2153 - DNA, 41 bp, Homo sapiens
gacttcccaacttaccttagyggagctgtagtcacatagaa

SEQ ID NO: 2154 - DNA, 41 bp, Homo sapiens
acgctcataaatgcttctctrggctgtaaaggttgaatttt

SEQ ID NO: 2155 - DNA, 41 bp, Homo sapiens
gttagacgcaggcattacctygtggctttgccccagtgtga

SEQ ID NO: 2156 - DNA, 41 bp, Homo sapiens
gggatgtttgcccacatccaytggcatttctcaaaaggaac

SEQ ID NO: 2157 - DNA, 41 bp, Homo sapiens
cagctgcctgcgctggagagrgctcaaacctcttccgccag

SEQ ID NO: 2158 - DNA, 41 bp, Homo sapiens
agcaaagatgccctttgactycttttcccactagtggtgct

SEQ ID NO: 2159 - DNA, 41 bp, Homo sapiens
gaatgaggtcacttgctgcawggcaggtggcttccccatga

SEQ ID NO: 2160 - DNA, 41 bp, Homo sapiens
cccaaataattttgtttttcrttttaggaattaaatttcag

SEQ ID NO: 2161 - DNA, 41 bp, Homo sapiens
aagaaacaaacatttattgasaacttttggtgtgtgacctg

SEQ ID NO: 2162 - DNA, 41 bp, Homo sapiens
tggtatttcttaaagaaataycaattccatttccttttaac

SEQ ID NO: 2163 - DNA, 41 bp, Homo sapiens
aagatcattattaatatctcrtcagcgtggtgtcacttaag

SEQ ID NO: 2164 - DNA, 41 bp, Homo sapiens
tgagaacattacatgggaccygcccccagggcatggaggct

SEQ ID NO: 2165 - DNA, 41 bp, Homo sapiens
tcaccctgtggtcgggaggtrtgagtgagctatccaagccc

SEQ ID NO: 2166 - DNA, 41 bp, Homo sapiens
ttgggtttcagtgtcagcatrtagctgtctactcagatccc

SEQ ID NO: 2167 - DNA, 41 bp, Homo sapiens
aagggcaccaaagttctaagrgatgaggggaggagctgagc

SEQ ID NO: 2168 - DNA, 41 bp, Homo sapiens
ggagctgagccccttgtcctyatctaggtttcccttgttct

SEQ ID NO: 2169 - DNA, 41 bp, Homo sapiens
ttcccatccctcagtctgctycttttcccagtaccaacatg

SEQ ID NO: 2170 - DNA, 41 bp, Homo sapiens
tcacctgtgtgggtagcaaayctcagaaaatcaagtataga

SEQ ID NO: 2171 - DNA, 41 bp, Homo sapiens
gagtcctttaaaacacaaatsttaatgtttgaaatcaactc

SEQ ID NO: 2172 - DNA, 41 bp, Homo sapiens
tgctgggccctgtgtgatcakgaatggctgatcatggatga

SEQ ID NO: 2173 - DNA, 41 bp, Homo sapiens
gggactcccctagagctgaartactctcccatctgtttgtt

SEQ ID NO: 2174 - DNA, 41 bp, Homo sapiens
ggaagatgaagaacctaagcygcttccagaaattcatgagg

SEQ ID NO: 2175 - DNA, 41 bp, Homo sapiens
gtctaccccttaggaccattrtaagagtacattgaggtaat

SEQ ID NO: 2176 - DNA, 41 bp, Homo sapiens
actgctcacccaggaggcaamgcctcgagtcatgcaccgaa

SEQ ID NO: 2177 - DNA, 41 bp, Homo sapiens
acagattattccattgtatgmatgaactatgtaagccatcc

SEQ ID NO: 2178 - DNA, 41 bp, Homo sapiens
ctggctgccgctggggtttcytatgtccatccacggggagg

SEQ ID NO: 2179 - DNA, 41 bp, Homo sapiens
ctgagttaggtctagatgggracactttggatgaatgagga

SEQ ID NO: 2180 - DNA, 41 bp, Homo sapiens
tatcaaatacaactcagacgkcagtctcctggcccctttga

SEQ ID NO: 2181 - DNA, 41 bp, Homo sapiens
cctgctttccaaacccttatyttgattcttggtaacatgaa

SEQ ID NO: 2182 - DNA, 41 bp, Homo sapiens
tttaaagaacagtgagtcacrtgacttgctctttgaaatgc

SEQ ID NO: 2183 - DNA, 41 bp, Homo sapiens
gacatgccatcagaccactgygagtgttcaggcagcctacc

SEQ ID NO: 2184 - DNA, 41 bp, Homo sapiens
ctccttccacacttgtgtgcrgggacattcactacctccta

SEQ ID NO: 2185 - DNA, 41 bp, Homo sapiens
gctgtcaataaggaccaaaayagactaatttcaaattcctc

SEQ ID NO: 2186 - DNA, 41 bp, Homo sapiens
agctgctaggaataaaaaggragacaaaacgatccacaagc

SEQ ID NO: 2187 - DNA, 41 bp, Homo sapiens
aataaaaagggagacaaaacratccacaagctagagatggt

SEQ ID NO: 2188 - DNA, 41 bp, Homo sapiens
aatcacagctcatctgctgcrtcatagggatcccaaaagaa

SEQ ID NO: 2189 - DNA, 41 bp, Homo sapiens
aatgtaacagccaaagtcctrgaaaaaggcaagccagttcc

SEQ ID NO: 2190 - DNA, 41 bp, Homo sapiens
ctaactgtgaattatcatctktgatcactgccctttgagat

SEQ ID NO: 2191 - DNA, 41 bp, Homo sapiens
gagttctcagcagcaaatctmcagtatgaaattttggattt

SEQ ID NO: 2192 - DNA, 41 bp, Homo sapiens
tccagaggtttagaacctcaycaagtgggactctaggagcc

SEQ ID NO: 2193 - DNA, 41 bp, Homo sapiens
aggatttttgacttgcttaaytaccatgaatgagaaactct

SEQ ID NO: 2194 - DNA, 41 bp, Homo sapiens
tgtttagtcaggcacatatgmacatccgactttcaaataag

SEQ ID NO: 2195 - DNA, 41 bp, Homo sapiens
tctccccaacatttatgtggmaagtaagtttacatttggtt

SEQ ID NO: 2196 - DNA, 41 bp, Homo sapiens
ttgaggcctccacaccccacrgcaggttgccccctgaggaa

SEQ ID NO: 2197 - DNA, 41 bp, Homo sapiens
cttggcagggaggtagggcayggggtggggtaggaggacta

SEQ ID NO: 2198 - DNA, 41 bp, Homo sapiens
ctgggggcagccattccccarcccctcacccagctctgact

SEQ ID NO: 2199 - DNA, 41 bp, Homo sapiens
taaatttgaatgagtaattcrtccatctcggcctcagtttc

SEQ ID NO: 2200 - DNA, 41 bp, Homo sapiens
tgttgcaggctggagaaccckcctatgaattgtacagggct

SEQ ID NO: 2201 - DNA, 41 bp, Homo sapiens
aaaaccccatgaagtggtcarggcaggcatcattatctcca

SEQ ID NO: 2202 - DNA, 41 bp, Homo sapiens
tagtagagtatgtgttggtcragcagagccaggggcaagca

SEQ ID NO: 2203 - DNA, 41 bp, Homo sapiens
tccttgggcaagttaatcttratgaagagactgggtgttct

SEQ ID NO: 2204 - DNA, 41 bp, Homo sapiens
cagagtcagactctggaaagkcggggggataagaacacagc

SEQ ID NO: 2205 - DNA, 41 bp, Homo sapiens
agagtcagactctggaaaggmggggggataagaacacagcc

SEQ ID NO: 2206 - DNA, 41 bp, Homo sapiens
ccaacatttgctaagcacccrccttcaaaaacctggtattt

SEQ ID NO: 2207 - DNA, 41 bp, Homo sapiens
gtattttcatgtaaattatcmgatacacagctgctatggaa

SEQ ID NO: 2208 - DNA, 41 bp, Homo sapiens
tattttcatgtaaattatccratacacagctgctatggaaa

SEQ ID NO: 2209 - DNA, 41 bp, Homo sapiens
ccagctgaacaccacgtgccrggtgtgtgctgatataaaca

SEQ ID NO: 2210 - DNA, 41 bp, Homo sapiens
tgcctggctagacaaaggggmagctcccgcccactagaaac

SEQ ID NO: 2211 - DNA, 41 bp, Homo sapiens
ctagacaaaggggaagctccygcccactagaaacttgcagg

SEQ ID NO: 2212 - DNA, 41 bp, Homo sapiens
gaggggaccttgttgggctgraggtgtcctgccagctggag

SEQ ID NO: 2213 - DNA, 41 bp, Homo sapiens
gacactgtacagccagcccamtcctgaccccttttcttcat

SEQ ID NO: 2214 - DNA, 41 bp, Homo sapiens
ggaaataaaactgacatcttraggctacatgaactaaccaa

SEQ ID NO: 2215 - DNA, 41 bp, Homo sapiens
atttggttcccagttttatgkagggtcatcatccctgtgtt

SEQ ID NO: 2216 - DNA, 41 bp, Homo sapiens
tctgcagagcatgggtcagcytcgagatgtctcagtactca

SEQ ID NO: 2217 - DNA, 41 bp, Homo sapiens
cctcttcccctccttgctctmaccctgtctcagttctcagt

SEQ ID NO: 2218 - DNA, 41 bp, Homo sapiens
gttctcagtccggtttcttcrtatcttgcagatttatccag

SEQ ID NO: 2219 - DNA, 41 bp, Homo sapiens
cgtatcttgcagatttatccrggcacctccagcccagcagt

SEQ ID NO: 2220 - DNA, 41 bp, Homo sapiens
tttgtagcctattcctataaraatgcaccattgcttcccat

SEQ ID NO: 2221 - DNA, 41 bp, Homo sapiens
taaaaatgcaccattgcttcscattacctccctccacacat

SEQ ID NO: 2222 - DNA, 41 bp, Homo sapiens
acctccctccacacatttttrcaaaacgtttcagggagttt

SEQ ID NO: 2223 - DNA, 41 bp, Homo sapiens
ctccacacatttttacaaaaygtttcagggagtttactgag

SEQ ID NO: 2224 - DNA, 41 bp, Homo sapiens
ttaaacagactggtcccctaygggcaggacagagaggatga

SEQ ID NO: 2225 - DNA, 41 bp, Homo sapiens
gagaggatgagctctcactcrtctgcctctttcctggctgc

SEQ ID NO: 2226 - DNA, 41 bp, Homo sapiens
gttaggtgctgctgacatctrtccagcatctgcttgactgg

SEQ ID NO: 2227 - DNA, 41 bp, Homo sapiens
ggcaggacgagtcctgagcaygcttcactggctcagacagg

SEQ ID NO: 2228 - DNA, 41 bp, Homo sapiens
actgagctggacgctagaaakaaactataggcttaagacac

SEQ ID NO: 2229 - DNA, 41 bp, Homo sapiens
tagagaagtttacttccatcrggacacatgcatcttttcta

SEQ ID NO: 2230 - DNA, 41 bp, Homo sapiens
ttgaaggatactcagtaattrctttttttcttgcagtattt

SEQ ID NO: 2231 - DNA, 41 bp, Homo sapiens
gtgtttggttcacacagctcyggagaaaaacaagtcacggc

SEQ ID NO: 2232 - DNA, 41 bp, Homo sapiens
ctccggagaaaaacaagtcayggcacagccttgacttggga

SEQ ID NO: 2233 - DNA, 41 bp, Homo sapiens
cccaagtctctggatggggcrtctgatcaggatgcatgcag

SEQ ID NO: 2234 - DNA, 41 bp, Homo sapiens
atgcatgcagagcctggctgrgatgagggagggctgctacc

SEQ ID NO: 2235 - DNA, 41 bp, Homo sapiens
accacttatctcaacagatcsgggacctgtggcctatttac

SEQ ID NO: 2236 - DNA, 41 bp, Homo sapiens
aagtcactaagctggttggtrggaggaacagcacataaccc

SEQ ID NO: 2237 - DNA, 41 bp, Homo sapiens
tgggaggaacagcacataacycaccttatctatgctgaggt

SEQ ID NO: 2238 - DNA, 41 bp, Homo sapiens
ggacactgcatagatatctayagaaatagcagcatgtcagg

SEQ ID NO: 2239 - DNA, 41 bp, Homo sapiens
acactctctggtggaccatcmctcatccaagagagggtaac

SEQ ID NO: 2240 - DNA, 41 bp, Homo sapiens
tctcgctcttctcttacctcyaggtgtttgtaaattttgct

SEQ ID NO: 2241 - DNA, 41 bp, Homo sapiens
agagagccccacccacaccayggtccctaccaagtccccac

SEQ ID NO: 2242 - DNA, 41 bp, Homo sapiens
gcagttaattccaaacttttmtcccttattggatgagatca

SEQ ID NO: 2243 - DNA, 88 bp, Homo sapiens
  misc_feature (63)..(65): tca is present or absent.
  misc_feature (66)..(68): tca is present or absent.
gtaaatctcagttgaatcagtcatcatcatcatcatcatcatcatcatcatcatcatcatcatcatcaatttttcagtctggttcctg

SEQ ID NO: 2244 - DNA, 50 bp, Homo sapiens
  misc_feature (29)..(30): a is present or absent.
gaggggcggggactataggcaaaaaaaaaacagcctaattcaaggatgag

SEQ ID NO: 2245 - DNA, 49 bp, Homo sapiens
  misc_feature (21)..(29): cacagtcat is present or absent.
ttgttggctttgcaatggatcacagtcatttattcactcattcattcac

SEQ ID NO: 2246 - DNA, 42 bp, Homo sapiens
  misc_feature (21)..(22): tt is present or absent.
cctgtccatcagactcttctttacctctccccgaggagccca

SEQ ID NO: 2247 - DNA, 52 bp, Homo sapiens
  misc_feature (31)..(32): a is present or absent.
cctgggtgacagagcgagataaaaaaaaaaaatagcatgagatattattact

SEQ ID NO: 2248 - DNA, 41 bp, Homo sapiens
  misc_feature (21)..(21): c is present or absent.
cacaaagcatctgacacccccatccagccctggctaacttt

SEQ ID NO: 2249 - DNA, 58 bp, Homo sapiens
  misc_feature (37)..(38): a is present or absent.
cactaaaaacaaaaatttacaaaaaaaaaaaaaaaaaacctgaaagaaattgcaggca

SEQ ID NO: 2250 - DNA, 41 bp, Homo sapiens
ttcatgacagatcagatgttgcttttatggatttacaaaga

SEQ ID NO: 2251 - DNA, 40 bp, Homo sapiens
ttcatgacagatcagatgttcttttatggatttacaaaga

SEQ ID NO: 2252 - DNA, 41 bp, Homo sapiens
  misc_feature (21)..(21): c is present or absent.
tttccttcttcaaacccccccagactaggagaaggtctgtc

SEQ ID NO: 2253 - DNA, 41 bp, Homo sapiens
  misc_feature (21)..(21): t is present or absent.
gggacggacagaaaaagacctagtttctgttgagccaaaga

SEQ ID NO: 2254 - DNA, 41 bp, Homo sapiens
  misc_feature (21)..(21): a is present or absent.
tattttttcaattaaataaaagagttttttgtttctaaaag

SEQ ID NO: 2255 - DNA, 42 bp, Homo sapiens
gggccgagtatgcacactgatgtgtgggaaagttagagaaga

SEQ ID NO: 2256 - DNA, 40 bp, Homo sapiens
gggccgagtatgcacactgatgtgggaaagttagagaaga

SEQ ID NO: 2257 - DNA, 53 bp, Homo sapiens
  misc_feature (31)..(33): t is present or absent.
atcttccccacctttcactatttttttttttttggtcttctatggggtaaagg

SEQ ID NO: 2258 - DNA, 66 bp, Homo sapiens
  misc_feature (43)..(44): gt is present or absent.
  misc_feature (45)..(46): gt is present or absent.
gtaccctggacctcccagaagtgtgtgtgtgtgtgtgtgtgtgtgtgagagagatgtgccttcctg

SEQ ID NO: 2259 - DNA, 41 bp, Homo sapiens
  misc_feature (21)..(21): a is present or absent.
ataggggcagaaaagacacaaccaaaagttctctctcactt

SEQ ID NO: 2260 - DNA, 41 bp, Homo sapiens
  misc_feature (21)..(21): g is present or absent.
catgatcagagtaagggggggttggaggatggggaggggag

SEQ ID NO: 2261 - DNA, 41 bp, Homo sapiens
  misc_feature (21)..(21): g is present or absent.
ggagaggaaatgatgttagtgcctcctgtaaataggcccag

SEQ ID NO: 2262 - DNA, 51 bp, Homo sapiens
  misc_feature (30)..(31): t is present or absent.
tgctcttttgtgggtaatggtttttttttttcctcttccaggagaagaaaa

SEQ ID NO: 2263 - DNA, 41 bp, Homo sapiens
cggggtggagggttgggagggctcatttgtcattatagatg

SEQ ID NO: 2264 - DNA, 40 bp, Homo sapiens
cggggtggagggttgggaggctcatttgtcattatagatg

SEQ ID NO: 2265 - DNA, 42 bp, Homo sapiens
  misc_feature (21)..(22): tt is present or absent.
tgctgccctcatcttctctcttaaactagttctgtatttctc

SEQ ID NO: 2266 - DNA, 49 bp, Homo sapiens
  misc_feature (28)..(29): a is present or absent.
tataacctgacttttttttcaaaaaaaaaggattgcttttttaaacata

SEQ ID NO: 2267 - DNA, 51 bp, Homo sapiens
  misc_feature (30)..(31): t is present or absent.
gctgaattagttcccttgggtttttttttttagttaactcctgatttttgc

SEQ ID NO: 2268 - DNA, 50 bp, Homo sapiens
  misc_feature (30)..(30): a is present or absent.
gataatcaatgctgtaagggaaaaaaaaaatggcattagagatccagacc

SEQ ID NO: 2269 - DNA, 42 bp, Homo sapiens
  misc_feature (21)..(22): gt is present or absent.
taaaaccgtcttgtttgtttgtttacatggtttttagggccc

SEQ ID NO: 2270 - DNA, 41 bp, Homo sapiens
  misc_feature (21)..(21): a is present or absent.
taagcagctatcacttaacaatacaaaaccagagattatca

SEQ ID NO: 2271 - DNA, 41 bp, Homo sapiens
ccttgaccaaagcctgggggtcagccattccccaacccctc

SEQ ID NO: 2272 - DNA, 40 bp, Homo sapiens
ccttgaccaaagcctgggggcagccattccccaacccctc

SEQ ID NO: 2273 - DNA, 41 bp, Homo sapiens
  misc_feature (21)..(21): a is present or absent.
ataaaaagagggggaaaaaaagaaggcagtcgctgcagggc

SEQ ID NO: 2274 - DNA, 42 bp, Homo sapiens
  misc_feature (21)..(22): ct is present or absent.
gtggacccctgagactgactctttccagatcttgttagggtt

SEQ ID NO: 2275 - DNA, 39 bp, Homo sapiens
  misc_feature (19)..(19): g is present or absent.
actctggaaaggcggggggataagaacacagccccagca

SEQ ID NO: 2276 - DNA, 41 bp, Homo sapiens
  misc_feature (21)..(21): a is present or absent.
gggccccacctgctgaagagagggggggtggggtttgcccc

SEQ ID NO: 2277 - DNA, 41 bp, Homo sapiens
  misc_feature (21)..(21): a is present or absent.
ttttctccaataatacaagtagaggatcgggttaaaatagg

SEQ ID NO: 2278 - DNA, 41 bp, Homo sapiens
  misc_feature (21)..(21): a is present or absent.
tgtagcctattcctataaaaatgcaccattgcttcccatta

SEQ ID NO: 2279 - DNA, 41 bp, Homo sapiens
  misc_feature (21)..(21): c is present or absent.
tttaattggcccagccatgcctttggtggcttttgtcattg

SEQ ID NO: 2280 - DNA, 44 bp, Homo sapiens
  misc_feature (21)..(24): aaag is present or absent.
catcctgctgaaggagaaagaaagcaccaatggcccaagcccta

SEQ ID NO: 2281 - DNA, 41 bp, Homo sapiens
agaatgttggccccctccccytcctgcatcctctgcagaag

SEQ ID NO: 2282 - DNA, 41 bp, Homo sapiens
aatgttggccccctccccctyctgcatcctctgcagaagcc

SEQ ID NO: 2283 - DNA, 41 bp, Homo sapiens
ggccagtgagtgacgggcagrtcgcccaaatagcagcgtgc

SEQ ID NO: 2284 - DNA, 41 bp, Homo sapiens
agagctggggtcgtgcctccrgctgggcaactgcctgtctc

SEQ ID NO: 2285 - DNA, 41 bp, Homo sapiens
ctctgtcccgtcccctgcccrgtctcaccatggccttctgg

SEQ ID NO: 2286 - DNA, 41 bp, Homo sapiens
ccccgggccaaggacctcccrttccaggcatccaggctgtc

SEQ ID NO: 2287 - DNA, 41 bp, Homo sapiens
cagcttgttggaggccgctgrggacctggcccaggaggtac

SEQ ID NO: 2288 - DNA, 41 bp, Homo sapiens
gccggagggtcacggaaactrtttgaagaagtaggagttag

SEQ ID NO: 2289 - DNA, 41 bp, Homo sapiens
tgcggaggatcagaggcacaygcaggagcaaggcagagggg

SEQ ID NO: 2290 - DNA, 41 bp, Homo sapiens
accggaccttcgaggagctcrccctgctgagggatgtccgg

SEQ ID NO: 2291 - DNA, 41 bp, Homo sapiens
ttttttttttttttttttttwtaagagatggagtctcactc

SEQ ID NO: 2292 - DNA, 41 bp, Homo sapiens
gttgcccaggctggactgcartggcgagatcttggctcact

SEQ ID NO: 2293 - DNA, 41 bp, Homo sapiens
cccaggctggactgcagtggygagatcttggctcactgcaa

SEQ ID NO: 2294 - DNA, 41 bp, Homo sapiens
gagatcttggctcactgcaayctccgcctcctggattcaag

SEQ ID NO: 2295 - DNA, 41 bp, Homo sapiens
cgcacacgctgatgtggggcrcctggtgggcacgctgggcc

SEQ ID NO: 2296 - DNA, 41 bp, Homo sapiens
gagtgacggaggtgagggccygtccacctgcggggtctgtt

SEQ ID NO: 2297 - DNA, 41 bp, Homo sapiens
cctgggccccggccacgtgcrcatcaaaatccgcatggaca

SEQ ID NO: 2298 - DNA, 41 bp, Homo sapiens
caggctgcgaactttgcacckttacaccactccacgtgacc

SEQ ID NO: 2299 - DNA, 41 bp, Homo sapiens
cccttcctgctcagcgccgcrctgctggttctggtgctcaa

SEQ ID NO: 2300 - DNA, 41 bp, Homo sapiens
ggtgcgctggagggtgacagrcaggggcggccccacgtggg

SEQ ID NO: 2301 - DNA, 41 bp, Homo sapiens
ggggcggccccacgtgggtgmgcgcccccaggccaatccag

SEQ ID NO: 2302 - DNA, 41 bp, Homo sapiens
cgttgcctctcacagctgggrgacatcctcccctacagcca

SEQ ID NO: 2303 - DNA, 41 bp, Homo sapiens
cgagggcgcgcagtggcacamcgtgggcacccggcctacgg

SEQ ID NO: 2304 - DNA, 41 bp, Homo sapiens
ggcggggctccgggccgggtsgcacctgctttgcgggaggc

SEQ ID NO: 2305 - DNA, 41 bp, Homo sapiens
ctggacccaaagggtgaggcmctacgaggcttaatagctgg

SEQ ID NO: 2306 - DNA, 41 bp, Homo sapiens
tcccgcagcttttataggccycggcccagcaggtcccggat

SEQ ID NO: 2307 - DNA, 41 bp, Homo sapiens
caccccatctctgcagtgctrgtagaagaggcaccgcccgg

SEQ ID NO: 2308 - DNA, 41 bp, Homo sapiens
cccggcctgagtcctggcgtmtccgttcgcagcctggagaa

SEQ ID NO: 2309 - DNA, 41 bp, Homo sapiens
cgagacagtaagagttggggrtagacagaggttcccctgga

SEQ ID NO: 2310 - DNA, 41 bp, Homo sapiens
ctgctgggagaccgtgtggcygtggtggcaggtggccgctt

SEQ ID NO: 2311 - DNA, 41 bp, Homo sapiens
gggtggggcgtgagccggggytccctgaagcacccctttgt

SEQ ID NO: 2312 - DNA, 41 bp, Homo sapiens
gggatctccgacaccagcctsgaggaggtgtgaggcctggg

SEQ ID NO: 2313 - DNA, 41 bp, Homo sapiens
ggagctctggtggctcagatrtcccttgggaaggcctgggg

SEQ ID NO: 2314 - DNA, 41 bp, Homo sapiens
gctggcctagacgtaaccctrcggctcaagatgccgccaca

SEQ ID NO: 2315 - DNA, 41 bp, Homo sapiens
cccagcctgccagtgtagccrgcccggtgcccggcgcctgc

SEQ ID NO: 2316 - DNA, 41 bp, Homo sapiens
ccccctgggagctctcccggmccccccggccctcagctccc

SEQ ID NO: 2317 - DNA, 41 bp, Homo sapiens
ctgcctgcatggccccacagrtacggaggcttctcgctggg

SEQ ID NO: 2318 - DNA, 41 bp, Homo sapiens
caaggagcagctgtctgaggstgcactgtgagtccctccac

SEQ ID NO: 2319 - DNA, 41 bp, Homo sapiens
ccactgcttgccactgccctrtctggccccttgtaggcagg

SEQ ID NO: 2320 - DNA, 41 bp, Homo sapiens
cagtactttgggaggccgagrcaggaggactgcttgtggcc

SEQ ID NO: 2321 - DNA, 41 bp, Homo sapiens
ggtgagccggatcttgaaacrggtcttccttatcttccccc

SEQ ID NO: 2322 - DNA, 41 bp, Homo sapiens
ggcccactcacctttctgaargacctgcactctcccaggta

SEQ ID NO: 2323 - DNA, 41 bp, Homo sapiens
ctctacctcccacacgcggascaggccctgagacacccctg

SEQ ID NO: 2324 - DNA, 41 bp, Homo sapiens
ctgagcccccggcgcccccayccccagcgtggcccgggaac

SEQ ID NO: 2325 - DNA, 41 bp, Homo sapiens
gtggcccgggaacccagtgcygcgcacctcagcatgggata

SEQ ID NO: 2326 - DNA, 41 bp, Homo sapiens
ctccttgactctgccttctgyggccctgcccacttgctcct

SEQ ID NO: 2327 - DNA, 41 bp, Homo sapiens
tggccgttcccagtttgcagycgtttcactgcctcttccat

SEQ ID NO: 2328 - DNA, 41 bp, Homo sapiens
cacactatggccctgccccayacccatcccagctccaccca

SEQ ID NO: 2329 - DNA, 41 bp, Homo sapiens
actatggccctgccccacacycatcccagctccacccacac

SEQ ID NO: 2330 - DNA, 41 bp, Homo sapiens
tggccctgccccacacccatsccagctccacccacaccatg

SEQ ID NO: 2331 - DNA, 41 bp, Homo sapiens
ccctgccccacacccatcccrgctccacccacaccatggcc

SEQ ID NO: 2332 - DNA, 41 bp, Homo sapiens
actcatgctggctccacccayaccatggccccgccccatac

SEQ ID NO: 2333 - DNA, 41 bp, Homo sapiens
tgccctgccccatgcccattrtgcccctgctccacactcaa

SEQ ID NO: 2334 - DNA, 41 bp, Homo sapiens
gaagcgctctgctcgcgcctrgccatcatggtgaatgggcg

SEQ ID NO: 2335 - DNA, 41 bp, Homo sapiens
ggcgcaggaccaggaggcgtsagccgggggctctgggtgga

SEQ ID NO: 2336 - DNA, 41 bp, Homo sapiens
ctgggtggatttagaagacayaatcaggtgtgcgttggagt

SEQ ID NO: 2337 - DNA, 41 bp, Homo sapiens
agttaggggagggcctggttrgtgggcggggccataggaaa

SEQ ID NO: 2338 - DNA, 41 bp, Homo sapiens
ggcggggccataggaaagtgsggcgggggtatttattgtgt

SEQ ID NO: 2339 - DNA, 41 bp, Homo sapiens
tggcggccgagttccctgggkcggagctgcgcgaggcacat

SEQ ID NO: 2340 - DNA, 41 bp, Homo sapiens
ctgcgcgaggcacatggaggycgcctgcgcttccagctgcc

SEQ ID NO: 2341 - DNA, 41 bp, Homo sapiens
acggcgccggggtcgggctgsgggaggcaggctgggggcca

SEQ ID NO: 2342 - DNA, 41 bp, Homo sapiens
aaggctggagagaagccgtgstggtgaaaccgtgtgcatgt

SEQ ID NO: 2343 - DNA, 41 bp, Homo sapiens
caagctgagtgtgcacatacrggccaagtggcgattcatag

SEQ ID NO: 2344 - DNA, 41 bp, Homo sapiens
cttacaggagcccggtgtccyggagcacaggccagggccgg

SEQ ID NO: 2345 - DNA, 41 bp, Homo sapiens
cagcagggagacttggggagrggggagagagttcacactgc

SEQ ID NO: 2346 - DNA, 41 bp, Homo sapiens
agcagggagacttggggaggrgggagagagttcacactgcg

SEQ ID NO: 2347 - DNA, 41 bp, Homo sapiens
cctcgacctgacccacttcayggggctgcagggcgggtgat

SEQ ID NO: 2348 - DNA, 66 bp, Homo sapiens
  misc_feature (43)..(46): t is present or absent.
cgtgaactaccacgtcctgcttttttttttttttttttttttttttaagagatggagtctcactct

SEQ ID NO: 2349 - DNA, 50 bp, Homo sapiens
  misc_feature (29)..(30): g is present or absent.
ggggactctgagggtctggtggggggggggactctgagggtctgggggcc

SEQ ID NO: 2350 - DNA, 47 bp, Homo sapiens
  misc_feature (27)..(27): c is present or absent.
ccccctgggagctctcccggcccccccggccctcagctccccttccc

SEQ ID NO: 2351 - DNA, 54 bp, Homo sapiens
  misc_feature (33)..(34): a is present or absent.
agaaagagaaagagagaaagaaaaaaaaaaaaaacagaaatgtgctttgggtga

SEQ ID NO: 2352 - DNA, 41 bp, Homo sapiens
cctgggcttcagcaggggccycacacctgcaatgggtgcct

SEQ ID NO: 2353 - DNA, 41 bp, Homo sapiens
cctcacacctgcaatgggtgyctggggagagggtgcagatg

SEQ ID NO: 2354 - DNA, 41 bp, Homo sapiens
tccaaagcccagatttggtgyttttggggctcttttggaat

SEQ ID NO: 2355 - DNA, 41 bp, Homo sapiens
ctggtggaggaagaaaggtarggagggcggctgctttgtgt

SEQ ID NO: 2356 - DNA, 41 bp, Homo sapiens
agctcaggaggtgtctggaaygccacacagtgcaggagttt

SEQ ID NO: 2357 - DNA, 41 bp, Homo sapiens
aattctccttctcaacttaargaaatattttatagaaaaat

SEQ ID NO: 2358 - DNA, 41 bp, Homo sapiens
agagcctgcaatgggccgccragggacctgcccatgactca

SEQ ID NO: 2359 - DNA, 41 bp, Homo sapiens
gaggggttgacagacaggatrtgtctgctgtgttccagctg

SEQ ID NO: 2360 - DNA, 41 bp, Homo sapiens
tgacagacaggatatgtctgstgtgttccagctgctggttt

SEQ ID NO: 2361 - DNA, 41 bp, Homo sapiens
ccctctctgtgcccactgttstcccaacaccagcctgttct

SEQ ID NO: 2362 - DNA, 41 bp, Homo sapiens
tataatagattcctagcagaraacataattgtgagaggaac

SEQ ID NO: 2363 - DNA, 41 bp, Homo sapiens
gctttcagagcccattcacayaagggtctcattttattagg

SEQ ID NO: 2364 - DNA, 41 bp, Homo sapiens
ccaggtctgtgggatttcagrccaaaaaggagcgtagcaag

SEQ ID NO: 2365 - DNA, 41 bp, Homo sapiens
gggttaaatattccgggcagygccaagtcagattatctgta

SEQ ID NO: 2366 - DNA, 41 bp, Homo sapiens
gctaaagtgcatggaaggcaycatgaataaatcctttcagg

SEQ ID NO: 2367 - DNA, 41 bp, Homo sapiens
tcacagcagattcatgagagwtgaatgtttagccgccatgt

SEQ ID NO: 2368 - DNA, 41 bp, Homo sapiens
agatgctcccctccagccagyacattttctccctgtgagca

SEQ ID NO: 2369 - DNA, 41 bp, Homo sapiens
acctgcatggtgggtgccccsctgccttcctctactgcctt

SEQ ID NO: 2370 - DNA, 41 bp, Homo sapiens
tgggtcagattaaatatatcytgaaggactaaaccgtaaaa

SEQ ID NO: 2371 - DNA, 41 bp, Homo sapiens
ttgctcacattgtgaaaaaasgcaaaaagatgggttttcag

SEQ ID NO: 2372 - DNA, 41 bp, Homo sapiens
gcctgagagcgctggcagtargaagggtcgccagtgtggac

SEQ ID NO: 2373 - DNA, 41 bp, Homo sapiens
tctggtttagagaggaaaatrggcagcatcattttgtcacc

SEQ ID NO: 2374 - DNA, 41 bp, Homo sapiens
gggctctcttggagccctttktctctcccagccctgcgtct

SEQ ID NO: 2375 - DNA, 41 bp, Homo sapiens
gggatttcgaatctcaacacyctgagctctgtgctttcccc

SEQ ID NO: 2376 - DNA, 41 bp, Homo sapiens
gagttgtcctccaagagaatytttgtatggttccttttctg

SEQ ID NO: 2377 - DNA, 41 bp, Homo sapiens
ctggggttggtgggagccacrgtctcacacctattggcagg

SEQ ID NO: 2378 - DNA, 41 bp, Homo sapiens
ctattggcaggtcgtgaacaytgttcttggatttgcaaata

SEQ ID NO: 2379 - DNA, 41 bp, Homo sapiens
acatggccggcttcccttctycctcggaatggcctggaatt

SEQ ID NO: 2380 - DNA, 41 bp, Homo sapiens
gccggcttcccttcttcctcrgaatggcctggaattcgatc

SEQ ID NO: 2381 - DNA, 41 bp, Homo sapiens
acaagacttagaatttgaccrtgattttaaaactattctaa

SEQ ID NO: 2382 - DNA, 41 bp, Homo sapiens
ttcttggatgtggccatgcaygggggcaagggtttgatgag

SEQ ID NO: 2383 - DNA, 41 bp, Homo sapiens
atcatgtggtttgggggaaasctgggaccccacttggtaca

SEQ ID NO: 2384 - DNA, 41 bp, Homo sapiens
caggaaggagacagctgctgstgctgcttagagttaggcgc

SEQ ID NO: 2385 - DNA, 41 bp, Homo sapiens
ccttcagttgtaataggcagraggagcgcacgaggaggctg

SEQ ID NO: 2386 - DNA, 41 bp, Homo sapiens
attgtttctcctggttttgtytgtgttgactttccctttaa

SEQ ID NO: 2387 - DNA, 41 bp, Homo sapiens
cagatcccttggttgctgggyaggtagtaggagaggttttt

SEQ ID NO: 2388 - DNA, 41 bp, Homo sapiens
aaacagggcttgagtcctccrtaagggacaggagaccttcc

SEQ ID NO: 2389 - DNA, 41 bp, Homo sapiens
aggagaccttcccacatcctrgcaagaattcttcttttttc

SEQ ID NO: 2390 - DNA, 41 bp, Homo sapiens
cagactaaatgcacaattctrgattgagctgactgtattga

SEQ ID NO: 2391 - DNA, 41 bp, Homo sapiens
tgtaaaagatggagaagaacrcagtagtcgcttgctgtgag

SEQ ID NO: 2392 - DNA, 41 bp, Homo sapiens
tgtgactcatggcctctgccrggggactgggctggccctgc

SEQ ID NO: 2393 - DNA, 41 bp, Homo sapiens
tgaaaagaaaatggatgagtrgaaaccaaaagagagaaaat

SEQ ID NO: 2394 - DNA, 41 bp, Homo sapiens
aagaaaatggatgagtggaamccaaaagagagaaaatgtgg

SEQ ID NO: 2395 - DNA, 41 bp, Homo sapiens
aagcagaggcttttccacccrgagactcaagaagctgctcc

SEQ ID NO: 2396 - DNA, 41 bp, Homo sapiens
gtggtgaagtagagctgagcwcacgggggagccctccatcc

SEQ ID NO: 2397 - DNA, 41 bp, Homo sapiens
atggccttgggccactgcctrctgtgccccgagccgagctt

SEQ ID NO: 2398 - DNA, 41 bp, Homo sapiens
cagcaggctccgtgctgaagycacagcaagccaggcccttg

SEQ ID NO: 2399 - DNA, 41 bp, Homo sapiens
agccaggcccttggcctgccrgagctggaagacccagaaca

SEQ ID NO: 2400 - DNA, 41 bp, Homo sapiens
gcctcccaggagtagctacaygggacccgaaggcagatggc

SEQ ID NO: 2401 - DNA, 41 bp, Homo sapiens
ggcagcctgggctgccgagaycctccctggagcgcccgccg

SEQ ID NO: 2402 - DNA, 41 bp, Homo sapiens
cgcccgccgggaagccccagrggggctggagctacaagtgg

SEQ ID NO: 2403 - DNA, 41 bp, Homo sapiens
ccaggggggctggagctacargtggccttgcaggttttttg

SEQ ID NO: 2404 - DNA, 41 bp, Homo sapiens
ccagctcatgggcaggggtgyggagggaaaggcacccacag

SEQ ID NO: 2405 - DNA, 41 bp, Homo sapiens
caccagagccactcagtcggycaagagcgtcgcccagtggt

SEQ ID NO: 2406 - DNA, 41 bp, Homo sapiens
gaagaccagcagtcgatgccrgctgggaagagggctctgcc

SEQ ID NO: 2407 - DNA, 41 bp, Homo sapiens
acccaccagccttttccagayagccttccagaagctgtttc

SEQ ID NO: 2408 - DNA, 41 bp, Homo sapiens
gagccgctggagtagggtccrcttgctatggctcccagggg

SEQ ID NO: 2409 - DNA, 41 bp, Homo sapiens
gaaaccaccagaaattgtgcrtcctctcatgtgtccattca

SEQ ID NO: 2410 - DNA, 41 bp, Homo sapiens
tattgactggacaccttctcygtatggggcactgggctagg

SEQ ID NO: 2411 - DNA, 41 bp, Homo sapiens
atcagtaacgggtcactaacrgatgctgctgagtggggcag

SEQ ID NO: 2412 - DNA, 41 bp, Homo sapiens
atttcatttcctcaatgtcgyctgaccagagagcgggaggt

SEQ ID NO: 2413 - DNA, 41 bp, Homo sapiens
tggcccactgttgagggtgtrggtgaccagaggggcctgga

SEQ ID NO: 2414 - DNA, 41 bp, Homo sapiens
tgtgtcctggtttgtggcttsatctaggaggtgtggtggcc

SEQ ID NO: 2415 - DNA, 41 bp, Homo sapiens
ctggaggagaagacaggatamagtctaagacgtgctgtcac

SEQ ID NO: 2416 - DNA, 41 bp, Homo sapiens
aggataaagtctaagacgtgytgtcacagagttcagggtcc

SEQ ID NO: 2417 - DNA, 41 bp, Homo sapiens
gcttccaaaggccgcatccgkgttgttctctgagccgagga

SEQ ID NO: 2418 - DNA, 41 bp, Homo sapiens
atccgggttgttctctgagcygaggacggctttgcgaacgc

SEQ ID NO: 2419 - DNA, 41 bp, Homo sapiens
tggctgacagtgaacacagcrgctgcttctccagaacttta

SEQ ID NO: 2420 - DNA, 41 bp, Homo sapiens
atgcagagtttcagaagaggsagactcaggaagagtaaggc

SEQ ID NO: 2421 - DNA, 41 bp, Homo sapiens
acccggagagccatggcaggmccaagtgttctggacgttgc

SEQ ID NO: 2422 - DNA, 41 bp, Homo sapiens
gcctctcagctgatggctgcrcagtcagatgtctggtggca

SEQ ID NO: 2423 - DNA, 41 bp, Homo sapiens
ctcagaactacatcgagtgargtcagtgttgaaaacgccca

SEQ ID NO: 2424 - DNA, 41 bp, Homo sapiens
atggggcccacagccctgccycagaagcagctttggtctcg

SEQ ID NO: 2425 - DNA, 41 bp, Homo sapiens
gggggaagagcttgggaaccrtgagggctgttaggctgcaa

SEQ ID NO: 2426 - DNA, 41 bp, Homo sapiens
tgaagggtgaactggagtagstgaggattctgcagttgacg

SEQ ID NO: 2427 - DNA, 76 bp, Homo sapiens
ccgatgaggaggggatggggcaccaggcagcagactctgatgaggaggggagggggcaccaggcagcagactctga

SEQ ID NO: 2428 - DNA, 40 bp, Homo sapiens
ccgatgaggaggggatggggcaccaggcagcagactctga

SEQ ID NO: 2429 - DNA, 41 bp, Homo sapiens
catgaacttgcctgaccatagccctgtgaggagctagggct

SEQ ID NO: 2430 - DNA, 40 bp, Homo sapiens
catgaacttgcctgaccataccctgtgaggagctagggct

SEQ ID NO: 2431 - DNA, 41 bp, Homo sapiens
tcatttgaaagtgggtatgcrgtttaaaactgacagttcaa

SEQ ID NO: 2432 - DNA, 41 bp, Homo sapiens
agctagtcataaataaatacrccagagtagtaaggaagaga

SEQ ID NO: 2433 - DNA, 41 bp, Homo sapiens
cctcatgaatggtatacatgwcccaacatatctctttcgat

SEQ ID NO: 2434 - DNA, 41 bp, Homo sapiens
acagtggtccctttgggtgcrtatacccaaatccctgcata

SEQ ID NO: 2435 - DNA, 41 bp, Homo sapiens
ataggaataattgagaacagrgtctgaagaactctgcagga

SEQ ID NO: 2436 - DNA, 41 bp, Homo sapiens
ctgaagaactctgcaggaaaygaaaatagttccctgctttt

SEQ ID NO: 2437 - DNA, 41 bp, Homo sapiens
tgaagaactctgcaggaaatraaaatagttccctgctttta

SEQ ID NO: 2438 - DNA, 41 bp, Homo sapiens
tcacttaaggctttgcagggkgtctaggacacagaaagaga

SEQ ID NO: 2439 - DNA, 41 bp, Homo sapiens
aaagtgtctttaaaatttccrtcttgagtcagtgagctatt

SEQ ID NO: 2440 - DNA, 41 bp, Homo sapiens
tcttgagtcagtgagctattkaaattcaagcaataagttat

SEQ ID NO: 2441 - DNA, 41 bp, Homo sapiens
ctgtttgggaacagcaactcmatcataggcagagagaaagt

SEQ ID NO: 2442 - DNA, 41 bp, Homo sapiens
atttcaaacctgtttcacaarttgttaagctcatcttaagg

SEQ ID NO: 2443 - DNA, 41 bp, Homo sapiens
gaaggtgcataacaacttcckacataaagtctggagctata

SEQ ID NO: 2444 - DNA, 41 bp, Homo sapiens
aaatgaagctgctcattgccrcacatttaaaaatggacttg

SEQ ID NO: 2445 - DNA, 41 bp, Homo sapiens
ctattgcttttctgtctgcakaaagataaaaactctccaga

SEQ ID NO: 2446 - DNA, 41 bp, Homo sapiens
atgtcgaagtttttatcccartgtcacaaggaaacaccaat

SEQ ID NO: 2447 - DNA, 41 bp, Homo sapiens
tgtaaaaagacagctttttartttacctacagtgaacctca

SEQ ID NO: 2448 - DNA, 41 bp, Homo sapiens
caaccctaaattggagggccygggcgtggtgattgagaaag

SEQ ID NO: 2449 - DNA, 41 bp, Homo sapiens
gttgacagacttttatagtgmgggacactgacctgcatgca

SEQ ID NO: 2450 - DNA, 41 bp, Homo sapiens
atgtatgtaccacgtcttcayattcttaaaggatgacccta

SEQ ID NO: 2451 - DNA, 41 bp, Homo sapiens
ggcaaatcttcgtgagtatargagagtataagtaagcgttt

SEQ ID NO: 2452 - DNA, 41 bp, Homo sapiens
tgacggtgagagaaaacttamagttctcagcagctcttcgg

SEQ ID NO: 2453 - DNA, 41 bp, Homo sapiens
actattctagttgattctagrttgtcaatacaacacactga

SEQ ID NO: 2454 - DNA, 41 bp, Homo sapiens
tcctattctgttttaataaargcattgaatttaggtttgct

SEQ ID NO: 2455 - DNA, 41 bp, Homo sapiens
gtcaggctgaactagagcaarcaatctaaaggcaagaatag

SEQ ID NO: 2456 - DNA, 41 bp, Homo sapiens
ttcatttttgtagcaccagcytgttatttaggtatctttct

SEQ ID NO: 2457 - DNA, 41 bp, Homo sapiens
gcacttggactttgctttgcyacatacttgcattgctctgc

SEQ ID NO: 2458 - DNA, 41 bp, Homo sapiens
tatactaataaatggtgtgtwtaagtttttatctctaattg

SEQ ID NO: 2459 - DNA, 41 bp, Homo sapiens
gacgcttatgtgcagcctatkttgatgtctggaaaggctga

SEQ ID NO: 2460 - DNA, 41 bp, Homo sapiens
ccctgagggctgaggtatctrgattatttccagacttgcta

SEQ ID NO: 2461 - DNA, 41 bp, Homo sapiens
tgtgagtaggtctttgttctrggaacggggctgtccagcag

SEQ ID NO: 2462 - DNA, 41 bp, Homo sapiens
tgttcttcaaggaaagccccygtcaaagaaggaaaagaagc

SEQ ID NO: 2463 - DNA, 41 bp, Homo sapiens
atgtctttagtcttgcctatkggtgaagtcagttgcacctt

SEQ ID NO: 2464 - DNA, 41 bp, Homo sapiens
tatgcagttacatggacagayacaacattggagaccgaggg

SEQ ID NO: 2465 - DNA, 41 bp, Homo sapiens
gctctgataaggaattgtttytttccttcatttcttcctgc

SEQ ID NO: 2466 - DNA, 41 bp, Homo sapiens
ttactcaagcaggcctgactyttagtatttgctttttgtag

SEQ ID NO: 2467 - DNA, 41 bp, Homo sapiens
ctaatgaaaacaaacaagaaygaaagattgtcactgtaaat

SEQ ID NO: 2468 - DNA, 41 bp, Homo sapiens
taactctttggaaacttcttraaatttaaaactgtttacct

SEQ ID NO: 2469 - DNA, 41 bp, Homo sapiens
ccaggggcactgaatttttcygagcctacgttttctcatcc

SEQ ID NO: 2470 - DNA, 41 bp, Homo sapiens
gccgcatagtcatgtgttgtwgtttttaaattaacttggaa

SEQ ID NO: 2471 - DNA, 41 bp, Homo sapiens
aacaagaaacacttgaataarttgagaaaaaaccccgtttt

SEQ ID NO: 2472 - DNA, 41 bp, Homo sapiens
tgagtagctgggattacaggygcccaccaccacacctggct

SEQ ID NO: 2473 - DNA, 41 bp, Homo sapiens
catcaattcaggtcaagaaayagaagattgtagcacacaaa

SEQ ID NO: 2474 - DNA, 44 bp, Homo sapiens
  misc_feature (21)..(24): tcac is present or absent.
gttgggatggctacactcactcacaaagcctgatggcccgtttc

SEQ ID NO: 2475 - DNA, 41 bp, Homo sapiens
  misc_feature (21)..(21): t is present or absent.
ctgctagtttattttttttttaacatttttaatttatgttt

SEQ ID NO: 2476 - DNA, 51 bp, Homo sapiens
  misc_feature (30)..(31): t is present or absent.
tcaatatgtttctgcttatctttttttttttaatggttacttaatcctaat

SEQ ID NO: 2477 - DNA, 48 bp, Homo sapiens
  misc_feature (28)..(28): a is present or absent.
aaacacttgaataagttgagaaaaaaaaccccgttttcacataatgtt

SEQ ID NO: 2478 - DNA, 41 bp, Homo sapiens
ggcctgggtgtcccatgttcrgaaagtcctgcaccagtggg

SEQ ID NO: 2479 - DNA, 41 bp, Homo sapiens
gaacacagaaggtattctgaragggcattgacccccatcct

SEQ ID NO: 2480 - DNA, 41 bp, Homo sapiens
tggtgtccctcatgaagtccytggcacaggggggccgtacc

SEQ ID NO: 2481 - DNA, 41 bp, Homo sapiens
ggcctcctaggggtagagatytcaccgtcgcctgccttccc

SEQ ID NO: 2482 - DNA, 41 bp, Homo sapiens
cttgcccttgggaagtgagtrtgaatctaaactgagctctc

SEQ ID NO: 2483 - DNA, 41 bp, Homo sapiens
ccccagaggcattgcaaccartgggtgctaggaagaaccta

SEQ ID NO: 2484 - DNA, 41 bp, Homo sapiens
aggtacacaacttaatggtasaagattctctgtagacctgg

SEQ ID NO: 2485 - DNA, 41 bp, Homo sapiens
acgtgagacgagataagtgayggtcatatggccagggagga

SEQ ID NO: 2486 - DNA, 41 bp, Homo sapiens
acgagataagtgatggtcatrtggccagggaggaaggggac

SEQ ID NO: 2487 - DNA, 41 bp, Homo sapiens
gggggacagcttgaacaagartgtggaggcaggatggacac

SEQ ID NO: 2488 - DNA, 41 bp, Homo sapiens
gagtgacaggcacatacatgmgaacaggccatctcagccct

SEQ ID NO: 2489 - DNA, 41 bp, Homo sapiens
aactcagattctcggcacctycagcagctggcttcgccaac

SEQ ID NO: 2490 - DNA, 41 bp, Homo sapiens
ctgaaattatatgcaaattcygtagctttataggaagcaga

SEQ ID NO: 2491 - DNA, 41 bp, Homo sapiens
ttgtgtaggaagctgatacaktaatttgacatatgagatgt

SEQ ID NO: 2492 - DNA, 41 bp, Homo sapiens
ccaagaaacttcagctttctyttcacttaaatataggaaac

SEQ ID NO: 2493 - DNA, 41 bp, Homo sapiens
atatccagaaacagatggtaygtgcagaacaggttgtacag

SEQ ID NO: 2494 - DNA, 41 bp, Homo sapiens
tggatgattagactgactctsagaatattgataagccattt

SEQ ID NO: 2495 - DNA, 56 bp, Homo sapiens
  misc_feature (34)..(36): t is present or absent.
tttgtctgggttggttggggttttttttttttttttgagactgggtctgactctca

SEQ ID NO: 2496 - DNA, 50 bp, Homo sapiens
  misc_feature (30)..(30): t is present or absent.
tacatttgtcaaaatttatattttttttttgcagataatcatttcatctc

SEQ ID NO: 2497 - DNA, 56 bp, Homo sapiens
  misc_feature (35)..(36): t is present or absent.
taaattcacatgattctgtattttttttttttttttaggatcctcctgactggcag

SEQ ID NO: 2498 - DNA, 57 bp, Homo sapiens
  misc_feature (34)..(37): t is present or absent.
tctttcaaacttatatttgctttttttttttttttttcatagtttcatgtttgatga

SEQ ID NO: 2499 - DNA, 41 bp, Homo sapiens
ttgctctgtttcaaatctcttattcatgggccagcagctcg

SEQ ID NO: 2500 - DNA, 40 bp, Homo sapiens
ttgctctgtttcaaatctctattcatgggccagcagctcg

SEQ ID NO: 2501 - DNA, 49 bp, Homo sapiens
  misc_feature (29)..(29): a is present or absent.
agtgtagatggacctcggggaaaaaaaaactagttaaggaaaagtaata

SEQ ID NO: 2502 - DNA, 49 bp, Homo sapiens
  misc_feature (29)..(29): t is present or absent.
ttccaattttccattgttactttttttttcttgccagattactcctgaa

SEQ ID NO: 2503 - DNA, 56 bp, Homo sapiens
  misc_feature (21)..(36): gcagtattac tgtagt is present or absent.
tcctctgcattttggcttctgcagtattactgtagtatttgtcattttcaaattaa

SEQ ID NO: 2504 - DNA, 54 bp, Homo sapiens
  misc_feature (34)..(34): t is present or absent.
ttttttggtttctttctttcttttttttttttttaatcttggaggaatcttttt

SEQ ID NO: 2505 - DNA, 50 bp, Homo sapiens
  misc_feature (30)..(30): t is present or absent.
gattagaaatccaggttaaattttttttttgttttgcacaaaaatattac

SEQ ID NO: 2506 - DNA, 51 bp, Homo sapiens
  misc_feature (31)..(31): t is present or absent.
taaaatttaatcaaaattgatttttttttttctcttagtcctcaaaccctt

SEQ ID NO: 2507 - DNA, 41 bp, Homo sapiens
taaatggagaaaataacaccracctgatagcattgttgtga

SEQ ID NO: 2508 - DNA, 41 bp, Homo sapiens
aaactccccaagcatgctcamctagatccttaccctaggtc

SEQ ID NO: 2509 - DNA, 41 bp, Homo sapiens
gccctgcccccactcccagasttgcggccctccagcccctt

SEQ ID NO: 2510 - DNA, 41 bp, Homo sapiens
cctcccccagaggagctgggyacactggggccttgtgttgt

SEQ ID NO: 2511 - DNA, 41 bp, Homo sapiens
attgtgtgttggcatactgcycacatggaaggatgctctag

SEQ ID NO: 2512 - DNA, 41 bp, Homo sapiens
ttttccttaggaagaaaaacrccttgctgttttatgcattt

SEQ ID NO: 2513 - DNA, 41 bp, Homo sapiens
aaaacattcatgggggattastgctggctacgtcagagtca

SEQ ID NO: 2514 - DNA, 41 bp, Homo sapiens
gcgctgccacagatcaggccraggtgggggacagaaatgcc

SEQ ID NO: 2515 - DNA, 41 bp, Homo sapiens
cccagaattctgaatacagcrgcgatgacgggactacgagg

SEQ ID NO: 2516 - DNA, 41 bp, Homo sapiens
aacagatccacaggaccagamagcaaaggggaggaacatgc

SEQ ID NO: 2517 - DNA, 41 bp, Homo sapiens
atgcagggaaggggcttggcrcaaaactgtcaactgagata

SEQ ID NO: 2518 - DNA, 41 bp, Homo sapiens
atgctccctggtccactttcrctttgagtttcaggtagctg

SEQ ID NO: 2519 - DNA, 41 bp, Homo sapiens
ccatggtctgcaggggtcctkcatgctcaggggattggggt

SEQ ID NO: 2520 - DNA, 41 bp, Homo sapiens
agaggacagaggaaagaggamcacctggagaactgggcgcc

SEQ ID NO: 2521 - DNA, 41 bp, Homo sapiens
aagaggcttccgcagctgtcygcaggttaaatcctggggtg

SEQ ID NO: 2522 - DNA, 41 bp, Homo sapiens
caggttaaatcctggggtgcraggaatgtttgttcagctcc

SEQ ID NO: 2523 - DNA, 41 bp, Homo sapiens
ataactggtacaggtttactsgtgtctacactggcagagaa

SEQ ID NO: 2524 - DNA, 41 bp, Homo sapiens
  misc_feature (21)..(21): t is present or absent.
gttttccccttgccttgccttcattttcatcacctcatttt

SEQ ID NO: 2525 - DNA, 55 bp, Homo sapiens
  misc_feature (33)..(35): t is present or absent.
cacactgccacacctggctatttttttttttttttggattttagtagagacgggg

SEQ ID NO: 2526 - DNA, 41 bp, Homo sapiens
tccagcgtgccgaccggcccsgcagcgcctccatccctccg

SEQ ID NO: 2527 - DNA, 41 bp, Homo sapiens
gcgtccaggcgcgcgcgccaractttggagggagaaggggg

SEQ ID NO: 2528 - DNA, 41 bp, Homo sapiens
agagaagaatggggcagagcsggagcagccaggggaggtga

SEQ ID NO: 2529 - DNA, 41 bp, Homo sapiens
ggatgagcactgcccagctgrtccctgcccaccttccacag

SEQ ID NO: 2530 - DNA, 41 bp, Homo sapiens
tccactgcagaggggacacastgaccaggacggaagttggg

SEQ ID NO: 2531 - DNA, 41 bp, Homo sapiens
gggctgtccatctttgtaccyctggttccatcccagtgcct

SEQ ID NO: 2532 - DNA, 41 bp, Homo sapiens
ccttttcttctctaaggcctraagagatgacagaatgctgc

SEQ ID NO: 2533 - DNA, 41 bp, Homo sapiens
agcgcgtggactccacagcgrggtgtggggtggcccctggc

SEQ ID NO: 2534 - DNA, 41 bp, Homo sapiens
gacacgcttcagccctctgtstctattgccccaaatctggc

SEQ ID NO: 2535 - DNA, 41 bp, Homo sapiens
ctgtggcttccctgggccctrggaaatttatcactgaggtt

SEQ ID NO: 2536 - DNA, 41 bp, Homo sapiens
gagtggggcactgctggaagsttctggttcctgctttgttc

SEQ ID NO: 2537 - DNA, 41 bp, Homo sapiens
aaacacactgggccacccccrtccccgcactgtgactacac

SEQ ID NO: 2538 - DNA, 41 bp, Homo sapiens
ctgagggcctgtcctgcaggkttgatgtgtctgaagaggcc

SEQ ID NO: 2539 - DNA, 41 bp, Homo sapiens
gtctgaagaggccccgagaayagaaatctagaacctgccag

SEQ ID NO: 2540 - DNA, 41 bp, Homo sapiens
cagtcacgaagcagtgtcacycaccagaggatgaagaactg

SEQ ID NO: 2541 - DNA, 41 bp, Homo sapiens
cttgcatctggtgtaggtgcytgggggtagcgtgcccagga

SEQ ID NO: 2542 - DNA, 41 bp, Homo sapiens
gacaggaaccccaccccgagkgatgtctggccctgtgacct

SEQ ID NO: 2543 - DNA, 41 bp, Homo sapiens
gcttgcacttctgattcattytgcagtcactggctctttgt

SEQ ID NO: 2544 - DNA, 41 bp, Homo sapiens
ccctggaagggcctcactgcrgtgactcattacccagcatg

SEQ ID NO: 2545 - DNA, 41 bp, Homo sapiens
acccacacagcatgaatgggsccagccccagcctgcccgct

SEQ ID NO: 2546 - DNA, 41 bp, Homo sapiens
gtagccacagctggggctgtsgggtcagggcatggcaaggg

SEQ ID NO: 2547 - DNA, 41 bp, Homo sapiens
ggatgtgtagggtttgggctyggccttaagggatgggtgga

SEQ ID NO: 2548 - DNA, 41 bp, Homo sapiens
gatgctggtcaggcattgtcrttgggatctttaacaccacc

SEQ ID NO: 2549 - DNA, 41 bp, Homo sapiens
tatttagcatgtgggtttcamctttctgttttttcaaaggg

SEQ ID NO: 2550 - DNA, 41 bp, Homo sapiens
gacttgggccacgtccttggscatgaatcttggtctatgtc

SEQ ID NO: 2551 - DNA, 41 bp, Homo sapiens
agcaagaaagtgtgctccccyacagccccactcaggcataa

SEQ ID NO: 2552 - DNA, 41 bp, Homo sapiens
agcacacatggagctttcccrcagtgggtttcagcgctccc

SEQ ID NO: 2553 - DNA, 41 bp, Homo sapiens
agggaagccgaagcctcactygctggggcttgcctggcctc

SEQ ID NO: 2554 - DNA, 41 bp, Homo sapiens
tgtgaagttttgcccacagtyggtggccatggttcgcaccg

SEQ ID NO: 2555 - DNA, 41 bp, Homo sapiens
gccactcatgtatggagcaaytgcctttttttcttcctctt

SEQ ID NO: 2556 - DNA, 41 bp, Homo sapiens
ccatagaagaggctgggcctkaggaagccagggaagcagga

SEQ ID NO: 2557 - DNA, 41 bp, Homo sapiens
ggtgtggggaggccagcaggrgtgtgggcctcagcggggag

SEQ ID NO: 2558 - DNA, 41 bp, Homo sapiens
ctctggtgtttgctgtcaatrtgcagagtgctggacaaaac

SEQ ID NO: 2559 - DNA, 41 bp, Homo sapiens
ctggaacagcaacttaaaaawagaaatagtccctggaaggg

SEQ ID NO: 2560 - DNA, 39 bp, Homo sapiens
gggtagccagggcagctcccygacccgcacctgcctttt

SEQ ID NO: 2561 - DNA, 39 bp, Homo sapiens
gcagctccccgacccgcasctgccttttcacccctctcc

SEQ ID NO: 2562 - DNA, 39 bp, Homo sapiens
gccattctagatgcgagtccygactttggggtgcttgca

SEQ ID NO: 2563 - DNA, 39 bp, Homo sapiens
cgagtcccgactttggggygcttgcattctgggaaggga

SEQ ID NO: 2564 - DNA, 41 bp, Homo sapiens
ctacagctgtgaaaggttagrcaagatacttaacatttctg

SEQ ID NO: 2565 - DNA, 41 bp, Homo sapiens
acacctcagaggagcctgtgmttaacatttgtaggattatt

SEQ ID NO: 2566 - DNA, 41 bp, Homo sapiens
aggcctcatctggggtagggscaagaggaaagtacagagtg

SEQ ID NO: 2567 - DNA, 41 bp, Homo sapiens
ctggaattcctccttagggcyctgggaagagtattgcttaa

SEQ ID NO: 2568 - DNA, 41 bp, Homo sapiens
cttaacgcaggatgtgctggrtgttttgtttcgggctttta

SEQ ID NO: 2569 - DNA, 41 bp, Homo sapiens
gcttggtgtctttcttgtttyatggctgtgtttttgctttt

SEQ ID NO: 2570 - DNA, 41 bp, Homo sapiens
ccgagggctgcccagctctgyttctggtttcctggacaatt

SEQ ID NO: 2571 - DNA, 41 bp, Homo sapiens
ctgtcagatacggcccattgyaaacccagagggctgcattt

SEQ ID NO: 2572 - DNA, 41 bp, Homo sapiens
gttccccatgtggaggtcggrggggctgggactggggaggg

SEQ ID NO: 2573 - DNA, 41 bp, Homo sapiens
ggccctgctaatgtggacagyagactttatccctccttctt

SEQ ID NO: 2574 - DNA, 41 bp, Homo sapiens
ccagatgtgcatagaagccartctctgtcacatacaccgca

SEQ ID NO: 2575 - DNA, 41 bp, Homo sapiens
taaagcaaatttaggcttttrtccttctgcaatacatgcac

SEQ ID NO: 2576 - DNA, 41 bp, Homo sapiens
ggaaggagcttcagcaggagrtccttcccagaaggttgatt

SEQ ID NO: 2577 - DNA, 41 bp, Homo sapiens
tcatacctgtaatcccagcakttggggaggccaaggtggga

SEQ ID NO: 2578 - DNA, 41 bp, Homo sapiens
ccattcccaaagtcagaaagygaagccagatctcaagggct

SEQ ID NO: 2579 - DNA, 39 bp, Homo sapiens
caaaagcacaaagcagaattsgcaacttcacttgtctca

SEQ ID NO: 2580 - DNA, 39 bp, Homo sapiens
cagaattggcaacttcacwtgtctcaagagctccaagat

SEQ ID NO: 2581 - DNA, 41 bp, Homo sapiens
ttccaaggctacagacatggygccatcctcacaggcctagc

SEQ ID NO: 2582 - DNA, 39 bp, Homo sapiens
atttcatgtctgcatggtacragacaccccttcacggca

SEQ ID NO: 2583 - DNA, 39 bp, Homo sapiens
tacgagacaccccttcacrgcatacactgccatggtatg

SEQ ID NO: 2584 - DNA, 41 bp, Homo sapiens
agacaggagtgttgggccagyggtcagggggcctggggatg

SEQ ID NO: 2585 - DNA, 41 bp, Homo sapiens
acctcttaaagtatttgagcyggtgcctgtcatcccaacct

SEQ ID NO: 2586 - DNA, 41 bp, Homo sapiens
  misc_feature (21)..(21): a is present or absent.
cgggagcaggaaaaaaaaaaagaataagaagaaaagaggct

SEQ ID NO: 2587 - DNA, 42 bp, Homo sapiens
  misc_feature (21)..(22): at is present or absent.
gctcatgctcacagccactcatgtatggagcaattgcctttt

SEQ ID NO: 2588 - DNA, 41 bp, Homo sapiens
ctgggtggagtggggtggcayggagttgaagacccagtcct

SEQ ID NO: 2589 - DNA, 41 bp, Homo sapiens
tgtgccggccccagccctgascatgcatccctttggggacc

SEQ ID NO: 2590 - DNA, 41 bp, Homo sapiens
accacccttctgcgtagcacrgagggtgggtggcatcaagg

SEQ ID NO: 2591 - DNA, 41 bp, Homo sapiens
tgtaggctgaggtcagccccmatccagtccaaagcccaccc

SEQ ID NO: 2592 - DNA, 41 bp, Homo sapiens
gaatgcggaagtgctctgtgrgcacccaccatgctccgggc

SEQ ID NO: 2593 - DNA, 41 bp, Homo sapiens
gatctggggcggagggtacayggggctggcgctgggtgaag

SEQ ID NO: 2594 - DNA, 41 bp, Homo sapiens
  misc_feature (21)..(21): t is present or absent.
tggtgtaaattttttttttttgcttcaaaaatatagtattt

SEQ ID NO: 2595 - DNA, 43 bp, Homo sapiens
  misc_feature (21)..(23): ttc is present or absent.
tgaactcggggttcagggtcttcctgtgaacactggttttgaa

SEQ ID NO: 2596 - DNA, 41 bp, Homo sapiens
ggaaatgctggctaaataaayggtatcaaactaactctgaa

SEQ ID NO: 2597 - DNA, 41 bp, Homo sapiens
tcgttggatggtagtattgtktgaacaacagaagaaattca

SEQ ID NO: 2598 - DNA, 41 bp, Homo sapiens
ccaaatgcatgccagcagagygtggcaggaaggtacacaag

SEQ ID NO: 2599 - DNA, 41 bp, Homo sapiens
aaggaatttgcataagacagytatgcaaaatggagctggag

SEQ ID NO: 2600 - DNA, 41 bp, Homo sapiens
cagaagatcttactctctaakgaagctggataacacttttt

SEQ ID NO: 2601 - DNA, 41 bp, Homo sapiens
tttactttggtaatcatactyatcaaatgtgtgtttagaca

SEQ ID NO: 2602 - DNA, 41 bp, Homo sapiens
aaaccacatactatttgattmtgatgagaatcacataacca

SEQ ID NO: 2603 - DNA, 41 bp, Homo sapiens
tatgattcaactttcaaaagwgtattgtgatatgaaataga

SEQ ID NO: 2604 - DNA, 41 bp, Homo sapiens
caacttctgccatcttattgratctgtacttacctagtaat

SEQ ID NO: 2605 - DNA, 41 bp, Homo sapiens
tggtaagaggctttaagatamcaaatgctcagctttcagga

SEQ ID NO: 2606 - DNA, 43 bp, Homo sapiens
tactcttaaaattaatccttcttttattataagtatacagtct

SEQ ID NO: 2607 - DNA, 40 bp, Homo sapiens
tactcttaaaattaatccttttattataagtatacagtct

SEQ ID NO: 2608 - DNA, 41 bp, Homo sapiens
aattacgactaacgttggggrcgaactctttgctaaataaa

SEQ ID NO: 2609 - DNA, 41 bp, Homo sapiens
cgccgcgcccccgccacagcrcccaggcgcccgcagggcac

SEQ ID NO: 2610 - DNA, 41 bp, Homo sapiens
tggccccaagggaggcacttrgccctactggggatgcgcgc

SEQ ID NO: 2611 - DNA, 41 bp, Homo sapiens
ttgggccgctgaccccgctcyctgggcccaggactgaccgc

SEQ ID NO: 2612 - DNA, 41 bp, Homo sapiens
tatacaagacacaagatctayaacagattttagaccaaaca

SEQ ID NO: 2613 - DNA, 41 bp, Homo sapiens
ttcacagatgaaggggttccraaatttttgtcaagaaagac

SEQ ID NO: 2614 - DNA, 41 bp, Homo sapiens
tcgccttcgtcttcatcctcktccagctcctctgattctga

SEQ ID NO: 2615 - DNA, 41 bp, Homo sapiens
cctttgaaaacagagcccccygagttacagtatcagcaaaa

SEQ ID NO: 2616 - DNA, 41 bp, Homo sapiens
actatcttctgtgcgcatgcrcagagcccaccttgcagagc

SEQ ID NO: 2617 - DNA, 41 bp, Homo sapiens
aggatgccagctctttaaatragacatcgtttttgcttaac

SEQ ID NO: 2618 - DNA, 41 bp, Homo sapiens
cttggtaggtaagcgcctgtrtgtgagccaagtcattcata

SEQ ID NO: 2619 - DNA, 41 bp, Homo sapiens
tgcaccttgaactgtttactytcctgtaaccatttaccctt

SEQ ID NO: 2620 - DNA, 41 bp, Homo sapiens
aaaacatccacgcaaacaggytgtgagaagttacgtctgcg

SEQ ID NO: 2621 - DNA, 41 bp, Homo sapiens
aagactgtgcatgtgccatgmagacagagatgtggatgcca

SEQ ID NO: 2622 - DNA, 41 bp, Homo sapiens
ttgttattttcttttctctgraatgcagtgatcagttgaca

SEQ ID NO: 2623 - DNA, 41 bp, Homo sapiens
ctgtgaaagcagattggagcyctggacctcaaacacacgca

SEQ ID NO: 2624 - DNA, 41 bp, Homo sapiens
tgtcggcatctgctgagtgtytgctgaagtctgaggactgg

SEQ ID NO: 2625 - DNA, 41 bp, Homo sapiens
ggctgggggaaagcagatcaygttggctaaaggacaggtgg

SEQ ID NO: 2626 - DNA, 41 bp, Homo sapiens
cagctgattatactactgaamcgggataaatgcagcttgat

SEQ ID NO: 2627 - DNA, 41 bp, Homo sapiens
ctactgaaacgggataaatgyagcttgatgattttcagctg

SEQ ID NO: 2628 - DNA, 41 bp, Homo sapiens
gtcacagtttaaatgctgctrttttactctgtgtaagtagc

SEQ ID NO: 2629 - DNA, 41 bp, Homo sapiens
aagcatctctattttgaatgyagatcagcactaaaagccct

SEQ ID NO: 2630 - DNA, 41 bp, Homo sapiens
gcaacgcccagttcctggtayaggcctcatatccagcgtgc

SEQ ID NO: 2631 - DNA, 41 bp, Homo sapiens
cctggaggcacaaggatggcmggggcactcaacttccctct

SEQ ID NO: 2632 - DNA, 41 bp, Homo sapiens
gttgtgtgactgtgtggggcrtctcacctctcgggctgcag

SEQ ID NO: 2633 - DNA, 41 bp, Homo sapiens
atcttgccttccctcctgccrtctgttcaggcttgaatcct

SEQ ID NO: 2634 - DNA, 41 bp, Homo sapiens
ccataatcctagcttgaaccytcctttttccctgctgaccc

SEQ ID NO: 2635 - DNA, 41 bp, Homo sapiens
acataattattgtaaacatgycgcttaccagtgacattcat

SEQ ID NO: 2636 - DNA, 41 bp, Homo sapiens
ccaggccactgattgctttcrcattttctagcattttctta

SEQ ID NO: 2637 - DNA, 41 bp, Homo sapiens
tttctgtgtggaaagctgatraagtcctcagatgacagccc

SEQ ID NO: 2638 - DNA, 41 bp, Homo sapiens
aataataatgaccatttctgkaaattcatagaattcctttt

SEQ ID NO: 2639 - DNA, 41 bp, Homo sapiens
gaggacattccacagaacgtrtgactattagagcagaaggt

SEQ ID NO: 2640 - DNA, 41 bp, Homo sapiens
ctggaggagaggggtggagcsagttcagccagcactggggt

SEQ ID NO: 2641 - DNA, 41 bp, Homo sapiens
agaaagggttacacaggagcrcacttctcagggagtggtgt

SEQ ID NO: 2642 - DNA, 41 bp, Homo sapiens
agggttacacaggagcacacytctcagggagtggtgtgacg

SEQ ID NO: 2643 - DNA, 41 bp, Homo sapiens
ctgtgaatcctctcacctgcrtgaagggcctggctgcctct

SEQ ID NO: 2644 - DNA, 41 bp, Homo sapiens
cacattgttatgtaaccaagyctggaattgcagtgtgaaga

SEQ ID NO: 2645 - DNA, 41 bp, Homo sapiens
attgttatgtaaccaagcctkgaattgcagtgtgaagaact

SEQ ID NO: 2646 - DNA, 41 bp, Homo sapiens
tcttgactattagaaaccctrtcagataaattttaaaacag

SEQ ID NO: 2647 - DNA, 41 bp, Homo sapiens
tggctttggttgggaacagcragagatacagaaccgacggt

SEQ ID NO: 2648 - DNA, 41 bp, Homo sapiens
cttgaagctgatcgttccctmcttgaagctgatcgttccct

SEQ ID NO: 2649 - DNA, 41 bp, Homo sapiens
gccagacgtgactgctttagrttcctcatgacattcagacc

SEQ ID NO: 2650 - DNA, 41 bp, Homo sapiens
ttccaaatcaccccagaactktgcagtattttgaagctcct

SEQ ID NO: 2651 - DNA, 51 bp, Homo sapiens
  misc_feature (30)..(31): c is present or absent.
gtaaaattgttttaactagacccccccccccttcctaaaccaaggtataaa

SEQ ID NO: 2652 - DNA, 61 bp, Homo sapiens
  misc_feature (36)..(41): a is present or absent.
ctgtatccattggaaggcacaaaaaaaaaaaaaaaaaaaaatgcaaaggaaacaaggcaaa

SEQ ID NO: 2653 - DNA, 56 bp, Homo sapiens
  misc_feature (21)..(36): ggggtggcgg ggtggg is present or absent.
tggcggggtggcagggtggcggggtggcggggtggggagcagttccacatctcccc

SEQ ID NO: 2654 - DNA, 41 bp, Homo sapiens
  misc_feature (21)..(21): t is present or absent.
ctcactggaacttttttttttaatttaatttttaaaatttt

SEQ ID NO: 2655 - DNA, 41 bp, Homo sapiens
cacttccattctgactgttaacggtgtgattcttcctgcca

SEQ ID NO: 2656 - DNA, 40 bp, Homo sapiens
cacttccattctgactgttacggtgtgattcttcctgcca

SEQ ID NO: 2657 - DNA, 41 bp, Homo sapiens
  misc_feature (21)..(21): a is present or absent.
gcgcgtgctgtttctcccttatctgtccttgtacacgtgtg

SEQ ID NO: 2658 - DNA, 52 bp, Homo sapiens
  misc_feature (31)..(32): t is present or absent.
tttctcgctttctgggagacttttttttttttaatgttgaaaatatgtgttt

SEQ ID NO: 2659 - DNA, 42 bp, Homo sapiens
aattcccccattgcttctctttctgtagacattttaaaccta

SEQ ID NO: 2660 - DNA, 40 bp, Homo sapiens
aattcccccattgcttctctctgtagacattttaaaccta

SEQ ID NO: 2661 - DNA, 61 bp, Homo sapiens
  misc_feature (21)..(41): tccctccttg aagctgatcg t is present or absent.
ccctccttgaagctgatcgttccctccttgaagctgatcgtgtccaagatagttgctagga

SEQ ID NO: 2662 - DNA, 76 bp, Homo sapiens
  misc_feature (45)..(46): ca is present or absent.
  misc_feature (47)..(48): ca is present or absent.
  misc_feature (49)..(50): ca is present or absent.
  misc_feature (51)..(52): ca is present or absent.
  misc_feature (53)..(54): ca is present or absent.
  misc_feature (55)..(56): ca is present or absent.
caaatatatgtatacatgtacacacacacacacacacacacacacacacacacacatccttcatgaaaactctttc

SEQ ID NO: 2663 - DNA, 41 bp, Homo sapiens
ttaataaatgtttattcaatkaaaccaactgctaatattct

SEQ ID NO: 2664 - DNA, 41 bp, Homo sapiens
cctggagattttaactttctrcgaagtttttaaaaacaact

SEQ ID NO: 2665 - DNA, 41 bp, Homo sapiens; identical to SEQ ID NO: 668

SEQ ID NO: 2666 - DNA, 41 bp, Homo sapiens
ccccttgggacggttctcacytgtgccccacttccccagtc

SEQ ID NO: 2667 - DNA, 41 bp, Homo sapiens
gcccgcaagcattgctgtatrgcacccaggcctccagtgag

SEQ ID NO: 2668 - DNA, 41 bp, Homo sapiens
cgagtaaaatttttctaccgstttgttttagagtggtgtct

SEQ ID NO: 2669 - DNA, 41 bp, Homo sapiens
aaaaaatttgtagatatgggkactccctatgttgcccaggc

SEQ ID NO: 2670 - DNA, 41 bp, Homo sapiens
tccctatgttgcccaggctgrtcttgaattcttgggctcaa

SEQ ID NO: 2671 - DNA, 41 bp, Homo sapiens
ttctcttctaagaagaagtcygtgcagatacttagcacaaa

SEQ ID NO: 2672 - DNA, 41 bp, Homo sapiens
tccagcatcttccctttccayttttaagttagacttttttt

SEQ ID NO: 2673 - DNA, 41 bp, Homo sapiens
agagacatttagaatatattmcctttaaaggtagagaataa

SEQ ID NO: 2674 - DNA, 41 bp, Homo sapiens
atatattccctttaaaggtasagaataacccttcactgaga

SEQ ID NO: 2675 - DNA, 41 bp, Homo sapiens
ggtttatagtgttcccccccwccccgcccccaaaagaccca

SEQ ID NO: 2676 - DNA, 41 bp, Homo sapiens
gaagctgccgctccaggaagsagtctgtcgttggagaagag

SEQ ID NO: 2677 - DNA, 41 bp, Homo sapiens
ggaaagctggggaactgtttkcctggaacagagtctcaaaa

SEQ ID NO: 2678 - DNA, 41 bp, Homo sapiens
tgtcaactgcgtaacacaggygtagaagtggacattgtttt

SEQ ID NO: 2679 - DNA, 41 bp, Homo sapiens
tttaatagaaaatggtattcytgtcttttctttcccatctc

SEQ ID NO: 2680 - DNA, 41 bp, Homo sapiens; identical to SEQ ID NO: 669

SEQ ID NO: 2681 - DNA, 41 bp, Homo sapiens
tatttgctttccttctctctytgttttctttttctctgaaa

SEQ ID NO: 2682 - DNA, 41 bp, Homo sapiens
cagcacgtttttcctatgaayaagacattctccaaataact

SEQ ID NO: 2683 - DNA, 41 bp, Homo sapiens
tggctctgtgtgcatgaacaygcacgcgtgcacgcgcacac

SEQ ID NO: 2684 - DNA, 41 bp, Homo sapiens
atgaacatgcacgcgtgcacrcgcacacacacacacacaca

SEQ ID NO: 2685 - DNA, 60 bp, Homo sapiens
  misc_feature (39)..(40): a is present or absent.
tgcgattatctttggtaattaaaaaaaaaaaaaaaaaaaaggcaaatcagtccaaatttg

SEQ ID NO: 2686 - DNA, 42 bp, Homo sapiens
ccccttcaatactagaacaaaagcagacacattaaatgttac

SEQ ID NO: 2687 - DNA, 40 bp, Homo sapiens
ccccttcaatactagaacaagcagacacattaaatgttac

SEQ ID NO: 2688 - DNA, 41 bp, Homo sapiens
  misc_feature (21)..(21): t is present or absent.
actatttcaatttttttttttggagggggagacagagtctc

SEQ ID NO: 2689 - DNA, 53 bp, Homo sapiens
  misc_feature (30)..(33): t is present or absent.
cccagcattataagaatgactttttttttttttaagtgcagatgtggggaggg

SEQ ID NO: 2690 - DNA, 42 bp, Homo sapiens
  misc_feature (21)..(22): aa is present or absent.
tagcatttggcaaaggagaaaatgccaagaagtatcttcgaa

SEQ ID NO: 2691 - DNA, 49 bp, Homo sapiens
  misc_feature (21)..(21): n is t or g.
  misc_feature (22)..(22): n is t.
  misc_feature (23)..(23): n is g or c.
  misc_feature (24)..(24): n is a or c.
  misc_feature (25)..(25): n is c or a.
  misc_feature (26)..(26): n is a.
  misc_feature (27)..(27): t is present or absent.
  misc_feature (28)..(28): a is present or absent.
  misc_feature (29)..(29): t is present or absent.
agaaaactggatgtctgaaannnnnnnnncactgcacttgtatgtgttg

SEQ ID NO: 2692 - DNA, 43 bp, Homo sapiens
  misc_feature (21)..(23): cta is present or absent.
ggattttagattcctccctactattctttccgaccttccaccc

SEQ ID NO: 2693 - DNA, 50 bp, Homo sapiens
  misc_feature (30)..(30): t is present or absent.
tttccatttttaagttagacttttttttttcacctctctcgttacttcag

SEQ ID NO: 2694 - DNA, 59 bp, Homo sapiens
tcctcttcatgtctctatgtgagatgttgtggctcacatagtcatcctctttgtgagac

SEQ ID NO: 2695 - DNA, 40 bp, Homo sapiens
tcctcttcatgtctctatgtagtcatcctctttgtgagac

SEQ ID NO: 2696 - DNA, 42 bp, Homo sapiens
  misc_feature (21)..(22): cc is present or absent.
acacacacacacacacacaccctgctctggagttgggcaact

SEQ ID NO: 2697 - DNA, 43 bp, Homo sapiens
  misc_feature (21)..(23): act is present or absent.
ttagaatagtttctaactatacttttactcccaagagaagctt

SEQ ID NO: 2698 - DNA, 41 bp, Homo sapiens
ctttctgatttttgatagtcsgttgaagaagggagtttgaa

SEQ ID NO: 2699 - DNA, 41 bp, Homo sapiens
ataacatcttctgcagagaamcttcaatggaaatacactca

SEQ ID NO: 2700 - DNA, 41 bp, Homo sapiens
tacagattatctttggtgatsggagagcttagaagagacat

SEQ ID NO: 2701 - DNA, 41 bp, Homo sapiens
atttcagaagatttattaacwtgaaaaggatcactctgctt

SEQ ID NO: 2702 - DNA, 41 bp, Homo sapiens
acatgaaaaggatcactctgyttattcacagacatatgcat

SEQ ID NO: 2703 - DNA, 41 bp, Homo sapiens
aaattattcaatctctttggrcagtggtttctttttctttg

SEQ ID NO: 2704 - DNA, 41 bp, Homo sapiens
cctgaatgtagagttgagatrtacagaagctttatccaatt

SEQ ID NO: 2705 - DNA, 41 bp, Homo sapiens
gagaagtaagacacattaccyataaatctgtaaatatccta

SEQ ID NO: 2706 - DNA, 41 bp, Homo sapiens
cattgatcagggtgatttatycatgctaagcttatttaatt

SEQ ID NO: 2707 - DNA, 41 bp, Homo sapiens
tatattgatcatgttgatacmtttatacacatatttgtcta

SEQ ID NO: 2708 - DNA, 41 bp, Homo sapiens
ttttaatctaataagcaattsaggaccatctaaagggaaat

SEQ ID NO: 2709 - DNA, 41 bp, Homo sapiens
aggtgcttacaggcaacatcyacatagcagtctgtggctgg

SEQ ID NO: 2710 - DNA, 41 bp, Homo sapiens
gacacattagcttcttttctrcagatctctgttctaaaaca

SEQ ID NO: 2711 - DNA, 41 bp, Homo sapiens
cttaaaattctttaatgaaakcattgcaacaaatttatatc

SEQ ID NO: 2712 - DNA, 41 bp, Homo sapiens
ataaatagaacaactccctawgtttacttctctgcagtgga

SEQ ID NO: 2713 - DNA, 41 bp, Homo sapiens
atcaccagataatttactatycattaaggagtaggtcatca

SEQ ID NO: 2714 - DNA, 41 bp, Homo sapiens
tgattggttagaatctttgamaaatcttctagtatcattcc

SEQ ID NO: 2715 - DNA, 41 bp, Homo sapiens
tactctgtgcattgttaatarcctatcacttgtggtctgcc

SEQ ID NO: 2716 - DNA, 41 bp, Homo sapiens
ctgtttaaattctcattcaayggccacatggttaaaataaa

SEQ ID NO: 2717 - DNA, 41 bp, Homo sapiens
atggcaatatttttagaaatrttaactcccaataatgaata

SEQ ID NO: 2718 - DNA, 41 bp, Homo sapiens
tatatcattattttaacttakagatagcactagccctaatt

SEQ ID NO: 2719 - DNA, 41 bp, Homo sapiens
ctcctaataatttggactcaycatacttattcagcactatc

SEQ ID NO: 2720 - DNA, 41 bp, Homo sapiens
ttccacacagggacaagtcarcagaggaaatttttcttgct

SEQ ID NO: 2721 - DNA, 41 bp, Homo sapiens
aacaaaggtttattttcttasagttctgatggctagacgtc

SEQ ID NO: 2722 - DNA, 41 bp, Homo sapiens
tttaaaatatgcatgtatttkccacttttaaaaactatatc

SEQ ID NO: 2723 - DNA, 41 bp, Homo sapiens
aaatcctccctccttccttcytttcccaggccccactctac

SEQ ID NO: 2724 - DNA, 41 bp, Homo sapiens
ttccctttctccttttctccrtctctctctcttcctctctc

SEQ ID NO: 2725 - DNA, 41 bp, Homo sapiens
ttttctcctcagcaaacatawaagctaatttcctccatcca

SEQ ID NO: 2726 - DNA, 41 bp, Homo sapiens
caccttgatactggacttggygggacagaaaaccagatcat

SEQ ID NO: 2727 - DNA, 41 bp, Homo sapiens
agaaagcccattgaaataagscagggtttttaggttttaat

SEQ ID NO: 2728 - DNA, 41 bp, Homo sapiens
aaaaacttttttgagttgacwatggtgagtttagtttctga

SEQ ID NO: 2729 - DNA, 41 bp, Homo sapiens
ctgcaggcaagctctagtgawtgtttattataggaaataat

SEQ ID NO: 2730 - DNA, 41 bp, Homo sapiens
gacaaatcagccatgttttayaatagcagacattatgccat

SEQ ID NO: 2731 - DNA, 41 bp, Homo sapiens
acaaatcagccatgttttacratagcagacattatgccatt

SEQ ID NO: 2732 - DNA, 41 bp, Homo sapiens
atcgatataggctttgggaamtatgaataccaaccatgggt

SEQ ID NO: 2733 - DNA, 41 bp, Homo sapiens
aaattttttcttagacctatkaatcaaaggaggcatacagt

SEQ ID NO: 2734 - DNA, 41 bp, Homo sapiens
attttattagatataactggmatgctaacaattttaaaagc

SEQ ID NO: 2735 - DNA, 41 bp, Homo sapiens
taacaatttcagttagcatgmgaagagttgtcccttattta

SEQ ID NO: 2736 - DNA, 41 bp, Homo sapiens
tttctgtaatggttttgcttycatgcttggacttgtaatca

SEQ ID NO: 2737 - DNA, 41 bp, Homo sapiens
gtgttgtggtgttttctctgrgatcaatggtcaaaaacctt

SEQ ID NO: 2738 - DNA, 41 bp, Homo sapiens
aagcttagaagtgataaataycaaaacaataatactatact

SEQ ID NO: 2739 - DNA, 41 bp, Homo sapiens
aaacaataatactatactggrtagactattagtacaagact

SEQ ID NO: 2740 - DNA, 41 bp, Homo sapiens
acggagtccctatggtgggarttcccatgtttgctgatcag

SEQ ID NO: 2741 - DNA, 41 bp, Homo sapiens
tttttaaaattcagaaactcrgttatggtgtattcttacaa

SEQ ID NO: 2742 - DNA, 41 bp, Homo sapiens
ttttaaaattcagaaactcarttatggtgtattcttacaaa

SEQ ID NO: 2743 - DNA, 41 bp, Homo sapiens
atcatattcattaccctccckctattattgtattttgaatc

SEQ ID NO: 2744 - DNA, 41 bp, Homo sapiens
aatttagtgctttttcttaayggaagtaacctgcttaaaaa

SEQ ID NO: 2745 - DNA, 41 bp, Homo sapiens
taattgacttttattaatacrtacatgttgtataagtcata

SEQ ID NO: 2746 - DNA, 41 bp, Homo sapiens
tagactattacaaagttgttrgttgctgacaattttgttca

SEQ ID NO: 2747 - DNA, 41 bp, Homo sapiens
gaatccaggctggaacttttmttccagacacaaaccaaaat

SEQ ID NO: 2748 - DNA, 41 bp, Homo sapiens
atacagacactgtccttttcrtcacaaacatacagatgtgt

SEQ ID NO: 2749 - DNA, 41 bp, Homo sapiens
agctcacacagtatcaaaatyatttttggaaaaattatgct

SEQ ID NO: 2750 - DNA, 41 bp, Homo sapiens
acttttttatgtctacatttsatcatactgtgttaagcata

SEQ ID NO: 2751 - DNA, 41 bp, Homo sapiens
tgcaagaattatattttctcmacgtaactatggccttaaac

SEQ ID NO: 2752 - DNA, 41 bp, Homo sapiens
gctatatttttggtcatacartgttgtttgttttcctgtca

SEQ ID NO: 2753 - DNA, 41 bp, Homo sapiens
aaggagtttaacaaaaacacrtctcccatcctgtttccaaa

SEQ ID NO: 2754 - DNA, 41 bp, Homo sapiens
aatctagaaaataattatcayttttataaaatttttagtca

SEQ ID NO: 2755 - DNA, 43 bp, Homo sapiens
  misc_feature (21)..(23): tat is present or absent.
ctcccaattagattgattagtatgagttcctggggttactggt

SEQ ID NO: 2756 - DNA, 74 bp, Homo sapiens
  misc_feature (49)..(50): ac is present or absent.
  misc_feature (51)..(52): ac is present or absent.
  misc_feature (53)..(54): ac is present or absent.
aatacattcttcccccttcaacacacacacacacacacacacacacacacacacatgcttactggcctatttat

SEQ ID NO: 2757 - DNA, 67 bp, Homo sapiens
  misc_feature (37)..(47): a is present or absent.
aaacttagaaacctctattcaaaaaaaaaaaaaaaaaaaaaaaaaaagtaaagaaaatggcagagaa

SEQ ID NO: 2758 - DNA, 41 bp, Homo sapiens
  misc_feature (21)..(21): t is present or absent.
attcaatgcaactttttttttgtaatggcagaattagaaca

SEQ ID NO: 2759 - DNA, 50 bp, Homo sapiens
  misc_feature (29)..(30): a is present or absent.
ctgttaggaaacaattggttaaaaaaaaaacttttttgagttgacaatgg

SEQ ID NO: 2760 - DNA, 62 bp, Homo sapiens
  misc_feature (39)..(40): gt is present or absent.
  misc_feature (41)..(42): gt is present or absent.
ttgtgtgtatgtgtatgtttgtgtgtgtgtgtgtgtgtgtgttattttaatgaattaatatc

SEQ ID NO: 2761 - DNA, 42 bp, Homo sapiens
  misc_feature (21)..(22): aa is present or absent.
gcttagtatattatatatataagtctatatatatagcttagt

SEQ ID NO: 2762 - DNA, 41 bp, Homo sapiens
  misc_feature (21)..(21): t is present or absent.
caatatttatgtcatttttttctcacatttactctgtttcc

SEQ ID NO: 2763 - DNA, 64 bp, Homo sapiens
  misc_feature (37)..(38): ac is present or absent.
  misc_feature (39)..(40): ac is present or absent.
  misc_feature (41)..(42): ac is present or absent.
  misc_feature (43)..(44): ac is present or absent.
agacagacagacacacaaacacacacacacacacacacacacactcaacacatgtaaactactc

SEQ ID NO: 2764 - DNA, 41 bp, Homo sapiens
  misc_feature (21)..(21): a is present or absent.
tatcttcaatgaaaataaaaacaaaaattgtctaatttctg

SEQ ID NO: 2765 - DNA, 41 bp, Homo sapiens
acagagtagatgttcaataartatttgttgtatctgtgaga

SEQ ID NO: 2766 - DNA, 41 bp, Homo sapiens
tagtgcagcgactatgccttratgtgtgtgtgtttgggatt

SEQ ID NO: 2767 - DNA, 41 bp, Homo sapiens
aaatgtgtgcctgtatgttayacatctgtacatatatttcc

SEQ ID NO: 2768 - DNA, 41 bp, Homo sapiens
acaaacacaactcaaagtatrtgtgttattaaaagtagcta

SEQ ID NO: 2769 - DNA, 41 bp, Homo sapiens
ttgattcaggcaagttagtcstaaatggctttgagagactt

SEQ ID NO: 2770 - DNA, 41 bp, Homo sapiens
caacataacaataatttcctrtaagaaaaatggccattttg

SEQ ID NO: 2771 - DNA, 41 bp, Homo sapiens
gtttagcaaggttagatattratgtggatgttaagacaaaa

SEQ ID NO: 2772 - DNA, 41 bp, Homo sapiens
ttgctagaagctagtaggacyagctttataaatacagagat

SEQ ID NO: 2773 - DNA, 41 bp, Homo sapiens
aactagttaggcaacccatgygttttaggggaaaagcaatg

SEQ ID NO: 2774 - DNA, 41 bp, Homo sapiens
gcaacccatgtgttttagggraaaagcaatgaggtcatgat

SEQ ID NO: 2775 - DNA, 41 bp, Homo sapiens
atagtttgctcttaagaatayactctgagaaggtttatagt

SEQ ID NO: 2776 - DNA, 41 bp, Homo sapiens
ttatgctcccgaggagttagytctctaaatgcataaggaga

SEQ ID NO: 2777 - DNA, 41 bp, Homo sapiens
aaagactgggagcacttcccratgacaaatactagactaga

SEQ ID NO: 2778 - DNA, 41 bp, Homo sapiens
ttacctcatattaacacctamatattgccacatatcctacc

SEQ ID NO: 2779 - DNA, 41 bp, Homo sapiens
aaaaagttatatagaaatatragtgtcactcctttctagtt

SEQ ID NO: 2780 - DNA, 41 bp, Homo sapiens
gtctactagtgttcaactccyttagatcttagcctgtatca

SEQ ID NO: 2781 - DNA, 41 bp, Homo sapiens
aaagcctaagaaggatgcagygcaatagcctatgtgagaag

SEQ ID NO: 2782 - DNA, 41 bp, Homo sapiens
tatggtttgcaaaaaacttaytcgtatatttgtttttttca

SEQ ID NO: 2783 - DNA, 41 bp, Homo sapiens
caggaaatgaagttgcacttycctctctaggagcaatgctt

SEQ ID NO: 2784 - DNA, 41 bp, Homo sapiens
tcagttttgtcaatttacacratggggatttgggacctttt

SEQ ID NO: 2785 - DNA, 41 bp, Homo sapiens
aatgaatagactttgagttaytggatttttagtggataaat

SEQ ID NO: 2786 - DNA, 41 bp, Homo sapiens
tgaatgtcacattttttaaartttgtgttccttatctcata

SEQ ID NO: 2787 - DNA, 41 bp, Homo sapiens
ttttattctggattcatgttygtggaaattgcagtagtcca

SEQ ID NO: 2788 - DNA, 41 bp, Homo sapiens
tccacaatgatgagtagagtrtcttggcacagttggccttc

SEQ ID NO: 2789 - DNA, 41 bp, Homo sapiens
agtgtctgaattataagccarttttatagttggttgggacc

SEQ ID NO: 2790 - DNA, 41 bp, Homo sapiens
aaagtgaaaggaaattaaaastgagaacttgagcctgaatg

SEQ ID NO: 2791 - DNA, 41 bp, Homo sapiens
tagaatgtaccaaatgaatcrgcatctctgaggatgggacc

SEQ ID NO: 2792 - DNA, 41 bp, Homo sapiens
tgaaatcttctttatcaactygattttcctccagactttac

SEQ ID NO: 2793 - DNA, 41 bp, Homo sapiens
gcaaactcctaagttgaagtsttttaggatattttttgact

SEQ ID NO: 2794 - DNA, 41 bp, Homo sapiens
tcatattttgtattttaaagrttatctgggttttactgaaa

SEQ ID NO: 2795 - DNA, 41 bp, Homo sapiens
tattcttctgagataaatcaytgaaggagtggctatgtggt

SEQ ID NO: 2796 - DNA, 41 bp, Homo sapiens
ttcactcctattcctcgctayttttcttccttatttcttag

SEQ ID NO: 2797 - DNA, 41 bp, Homo sapiens
ttcttcttcttttggagctcwaaagtagagttcagttaatc

SEQ ID NO: 2798 - DNA, 41 bp, Homo sapiens
atcatcactgcatgagagttrgaattatctaactttgtgat

SEQ ID NO: 2799 - DNA, 41 bp, Homo sapiens
tttcttttatttacaaacttrtttacttttcaggtgtatga

SEQ ID NO: 2800 - DNA, 41 bp, Homo sapiens
ctatcagaacaatattattaktattattttttattacactt

SEQ ID NO: 2801 - DNA, 41 bp, Homo sapiens
tatgttttgataaactttgcmgtacaaataaagaaaattga

SEQ ID NO: 2802 - DNA, 41 bp, Homo sapiens
tacaaataaagaaaattgaartatttccaaataaatcaagt

SEQ ID NO: 2803 - DNA, 41 bp, Homo sapiens
tctctggtctccaaaatcatrtattttctccctctttacat

SEQ ID NO: 2804 - DNA, 41 bp, Homo sapiens
atatattttctccctctttamattttgctgaaacaatcttc

SEQ ID NO: 2805 - DNA, 41 bp, Homo sapiens
gtctttaagaacctaaaaaamctcttaactcaaaataataa

SEQ ID NO: 2806 - DNA, 41 bp, Homo sapiens
agtgactaaagtttttcttamaaacaagtgtctgaatcaaa

SEQ ID NO: 2807 - DNA, 41 bp, Homo sapiens
aatacactatggttatttatrtgtactataaatggagtgag

SEQ ID NO: 2808 - DNA, 41 bp, Homo sapiens
atttcctaaatgatcagatgyatcatatgaaaaaagaaagc

SEQ ID NO: 2809 - DNA, 41 bp, Homo sapiens
aggtgactgacataaatgggrgcagaggacataatgaggtt

SEQ ID NO: 2810 - DNA, 41 bp, Homo sapiens
attttctaatctgtattaaaagcgttccaggtatttttgta

SEQ ID NO: 2811 - DNA, 40 bp, Homo sapiens
attttctaatctgtattaaagcgttccaggtatttttgta

SEQ ID NO: 2812 - DNA, 42 bp, Homo sapiens
  misc_feature (21)..(22): aa is present or absent.
tgatctttaatagcggggaaaacaggcaagtacgctatagtt

SEQ ID NO: 2813 - DNA, 42 bp, Homo sapiens
  misc_feature (21)..(22): ca is present or absent.
attgagtcaggaaaccaaaacagtttcaaaaatttgaaaaat

SEQ ID NO: 2814 - DNA, 41 bp, Homo sapiens
  misc_feature (21)..(21): t is present or absent.
aatgtcatgtcttttttttttaatgcagagtgtacaaagga

SEQ ID NO: 2815 - DNA, 46 bp, Homo sapiens
  misc_feature (21)..(26): tgtgtg is present or absent.
attgtatgtgcatgtgggtgtgtgtgcatgattgtctttgtgatat

SEQ ID NO: 2816 - DNA, 41 bp, Homo sapiens
ggataaggcaacccctatgtrtcactgctgcaggagaggga

SEQ ID NO: 2817 - DNA, 41 bp, Homo sapiens
aacataggaatgtgcagagcyctgtggggattagagaagag

SEQ ID NO: 2818 - DNA, 41 bp, Homo sapiens
tgatgatgccagagctttgakcattggtgggtatagaaaca

SEQ ID NO: 2819 - DNA, 41 bp, Homo sapiens
tctttcagacttcaaaggccrtgatatttcatcagagctgt

SEQ ID NO: 2820 - DNA, 41 bp, Homo sapiens
tgcttatttaacaggcataakctttggtctcctgagccaga

SEQ ID NO: 2821 - DNA, 41 bp, Homo sapiens
tatgtgcatatgtgtatacargtaaaagtgtgtatatatgt

SEQ ID NO: 2822 - DNA, 41 bp, Homo sapiens
aatcatttgaaatttaagaaraaaatatgttcagagaaaaa

SEQ ID NO: 2823 - DNA, 41 bp, Homo sapiens
gtgaaatgaggaacaaagtgyccacctttttttcctgaata

SEQ ID NO: 2824 - DNA, 41 bp, Homo sapiens
agagagatgtgaaatagtatktttctggggaagtaggggaa

SEQ ID NO: 2825 - DNA, 41 bp, Homo sapiens
ttgttagtagaaagaaaatcraagcctaaaactaaaggaag

SEQ ID NO: 2826 - DNA, 41 bp, Homo sapiens
ttgctattatataattttttwaaaaaaagatttcctaatat

SEQ ID NO: 2827 - DNA, 41 bp, Homo sapiens
tgctattatataatttttttwaaaaaagatttcctaatatt

SEQ ID NO: 2828 - DNA, 41 bp, Homo sapiens
ggaaaaaatggggtgaaattwatcaaagggcagcttattac

SEQ ID NO: 2829 - DNA, 41 bp, Homo sapiens
acattatattctatataaaakagtcagttgaagtaaaaagt

SEQ ID NO: 2830 - DNA, 41 bp, Homo sapiens
tctgtctttcctacttttgtktccagcattgacctagcaga

SEQ ID NO: 2831 - DNA, 41 bp, Homo sapiens
tgattaagtatttctttggcraaatttttgatgcttaatag

SEQ ID NO: 2832 - DNA, 41 bp, Homo sapiens
ttgagtaacatttaggccaartggcagtcataaggaaaaag

SEQ ID NO: 2833 - DNA, 41 bp, Homo sapiens
agaggaattaatcataagagktttatttggctaaagtgaca

SEQ ID NO: 2834 - DNA, 41 bp, Homo sapiens
gttagttaataacagaaaaawtatcagaaattttaaaaaat

SEQ ID NO: 2835 - DNA, 41 bp, Homo sapiens
ttctaaaataagtaagctaawtattctatattatactacta

SEQ ID NO: 2836 - DNA, 41 bp, Homo sapiens
ttgtataagagatacaaaacmaattcctactaggggaaata

SEQ ID NO: 2837 - DNA, 41 bp, Homo sapiens
ctaggggaaataaagcttcastaaggaggtggcattaagct

SEQ ID NO: 2838 - DNA, 41 bp, Homo sapiens
atggagagaagcagcagtgtrccacagataaatgaagtgag

SEQ ID NO: 2839 - DNA, 41 bp, Homo sapiens
ttcaaaagctgtatttctcaytagtgctttttgtgaataaa

SEQ ID NO: 2840 - DNA, 41 bp, Homo sapiens
tatatacacaatacctgtccrgaagatgtggtataagccaa

SEQ ID NO: 2841 - DNA, 41 bp, Homo sapiens
tatcaatacttatgaagagarctaactattctaactaggga

SEQ ID NO: 2842 - DNA, 41 bp, Homo sapiens
ttccccacctcctgttggttstcctcttaaacttctccttg

SEQ ID NO: 2843 - DNA, 41 bp, Homo sapiens
cctatctgcacataacattayaaacttatggcaattataaa

SEQ ID NO: 2844 - DNA, 41 bp, Homo sapiens
acaaacttatggcaattataraactcaatacatattatact

SEQ ID NO: 2845 - DNA, 41 bp, Homo sapiens
gcccttgttcctgttcctctrtacctgcctcaactacatag

SEQ ID NO: 2846 - DNA, 41 bp, Homo sapiens
ctggagacggtagctcaaacygaggatgaaaatagacattt

SEQ ID NO: 2847 - DNA, 41 bp, Homo sapiens
ggttatcaactggggtaaatktatctctcacaggcaatttg

SEQ ID NO: 2848 - DNA, 41 bp, Homo sapiens
tgctaaatattctataatgcrcaaagaatgatgtaactgaa

SEQ ID NO: 2849 - DNA, 41 bp, Homo sapiens
ccctttaaataggcagttacmttttgagaagatacccacta

SEQ ID NO: 2850 - DNA, 41 bp, Homo sapiens
ttcatgatccaaattgtggcracgtatttccaggcaacaag

SEQ ID NO: 2851 - DNA, 41 bp, Homo sapiens
aggcaacaagatagaagaagraaagaataagaagcaacaaa

SEQ ID NO: 2852 - DNA, 41 bp, Homo sapiens
aaaatagacattattccaagwtaccaagttcccggttaaaa

SEQ ID NO: 2853 - DNA, 41 bp, Homo sapiens
ttcccggttaaaaatcccaastataattactgtggaaggaa

SEQ ID NO: 2854 - DNA, 41 bp, Homo sapiens
aaggaccacaatctagatcakcattgctctaaatatgccat

SEQ ID NO: 2855 - DNA, 41 bp, Homo sapiens
tatgccataatatgtgacacytttgcacctggtatttctac

SEQ ID NO: 2856 - DNA, 41 bp, Homo sapiens
catctagttgaaatggattasattttatttttactacattt

SEQ ID NO: 2857 - DNA, 41 bp, Homo sapiens
attctaaagaaactaatatcrattcatcagaaaattcaaca

SEQ ID NO: 2858 - DNA, 41 bp, Homo sapiens
taatcaaattttatcactcartagagcatcacctgagatag

SEQ ID NO: 2859 - DNA, 41 bp, Homo sapiens
ttaatatacacagttcgcccwttaacaacacaggtttaaac

SEQ ID NO: 2860 - DNA, 41 bp, Homo sapiens
acaacacaggtttaaactacrcgttttcacttctatgcaaa

SEQ ID NO: 2861 - DNA, 41 bp, Homo sapiens
aacacaggtttaaactacgcrttttcacttctatgcaaatt

SEQ ID NO: 2862 - DNA, 41 bp, Homo sapiens
atataactttgctttcattgyaaaaggcaaactgttatatc

SEQ ID NO: 2863 - DNA, 41 bp, Homo sapiens
ttcattgcaaaaggcaaactrttatatcatttaaagacttt

SEQ ID NO: 2864 - DNA, 41 bp, Homo sapiens
agtcatgataaacctaatagrataaaacaacaaaaaagaaa

SEQ ID NO: 2865 - DNA, 41 bp, Homo sapiens
acagataatttttacttgttygtgcttttctgtatgatatg

SEQ ID NO: 2866 - DNA, 41 bp, Homo sapiens
ccttgattgtaataatctccmcatgccaagagtggggccag

SEQ ID NO: 2867 - DNA, 41 bp, Homo sapiens
ttgattgtaataatctccacmtgccaagagtggggccaggt

SEQ ID NO: 2868 - DNA, 41 bp, Homo sapiens
actgttctcgtggtaatgaakaagtctcacaagatctgatg

SEQ ID NO: 2869 - DNA, 41 bp, Homo sapiens
ttataaatgagagttcccctrcaaaagctctcttgcctgcc

SEQ ID NO: 2870 - DNA, 41 bp, Homo sapiens
ttgctcttccttcatcttccrccatgattgtgaggcccccc

SEQ ID NO: 2871 - DNA, 41 bp, Homo sapiens
gtcatacatgtggatatatgygttcatgggtaatatgcttc

SEQ ID NO: 2872 - DNA, 41 bp, Homo sapiens
gggagactcccatagtaccaytggggctttcttacattgat

SEQ ID NO: 2873 - DNA, 41 bp, Homo sapiens
ctttcttacattgatgatttygctaaagaaggacattcttc

SEQ ID NO: 2874 - DNA, 41 bp, Homo sapiens
agaacaaggtaccatgataaygtctttctaagcacacatgc

SEQ ID NO: 2875 - DNA, 41 bp, Homo sapiens
caaaataaccaaatgtaaaawgtctccctcccaaactgact

SEQ ID NO: 2876 - DNA, 41 bp, Homo sapiens
gtaatctcacatttctctgcrtttacacttggtaaaacttt

SEQ ID NO: 2877 - DNA, 41 bp, Homo sapiens
agtctcaaattaatagccaaragcatgcctttattgtaacc

SEQ ID NO: 2878 - DNA, 41 bp, Homo sapiens
ctttaccacatgacagaatgrcatgttcttagcaaataata

SEQ ID NO: 2879 - DNA, 41 bp, Homo sapiens
tttacatgttcaattttagamatatgccttagagtagctac

SEQ ID NO: 2880 - DNA, 41 bp, Homo sapiens
ttctcacgtcctatctagcgygattatgacccttagttact

SEQ ID NO: 2881 - DNA, 41 bp, Homo sapiens
gtggaagagaattaggtttgyactttttagcagggagaaac

SEQ ID NO: 2882 - DNA, 41 bp, Homo sapiens
tcgggagaagtttctccctaygtaattagagtaatatttat

SEQ ID NO: 2883 - DNA, 41 bp, Homo sapiens
atgtaattagagtaatatttmttttggtaattatctatcta

SEQ ID NO: 2884 - DNA, 41 bp, Homo sapiens
taagtaatgtaaattaggatkcatcagcatttgacagtgcc

SEQ ID NO: 2885 - DNA, 41 bp, Homo sapiens
tggagaaccattgagagtcartaaacaaagagaatgacttg

SEQ ID NO: 2886 - DNA, 41 bp, Homo sapiens
tgatcacagatccaaatgacrtaatttctaccatgaacaga

SEQ ID NO: 2887 - DNA, 41 bp, Homo sapiens
attttagtaatacaggataastataattttcttgtattctt

SEQ ID NO: 2888 - DNA, 41 bp, Homo sapiens
ttagaggtagtatctgtatarttggatcttataatttagtg

SEQ ID NO: 2889 - DNA, 41 bp, Homo sapiens
tgctaagatctgagacaaacscttttgtaattataatcatt

SEQ ID NO: 2890 - DNA, 41 bp, Homo sapiens
aggttctgtatgttttttaayaaatgacaaagatatattaa

SEQ ID NO: 2891 - DNA, 41 bp, Homo sapiens
tacacttgttccataaaaaaytcctctatattattcctagt

SEQ ID NO: 2892 - DNA, 41 bp, Homo sapiens
attaatagattcaacgtgagsttcccttaaactttagccta

SEQ ID NO: 2893 - DNA, 41 bp, Homo sapiens
cttatatagaaagaaatccasaaaactattttaccttttat

SEQ ID NO: 2894 - DNA, 41 bp, Homo sapiens
aatatattagtttgaacaagygagacttcactaaatataat

SEQ ID NO: 2895 - DNA, 41 bp, Homo sapiens
gagacttcactaaatataatrcaatgtatttgcagcactgt

SEQ ID NO: 2896 - DNA, 41 bp, Homo sapiens
aacattccaaaacttttaatygactcacagcatgactttta

SEQ ID NO: 2897 - DNA, 41 bp, Homo sapiens
attccaaaacttttaatcgaytcacagcatgacttttataa

SEQ ID NO: 2898 - DNA, 41 bp, Homo sapiens
tccaaaacttttaatcgactmacagcatgacttttataata

SEQ ID NO: 2899 - DNA, 41 bp, Homo sapiens
aatgaaaagaagctggcagaytgaaacatactgaatgagag

SEQ ID NO: 2900 - DNA, 41 bp, Homo sapiens
tatatatatatatatatatayacacacacatacatatatta

SEQ ID NO: 2901 - DNA, 41 bp, Homo sapiens
aattctgagtatcctatttcratgtatccaatctgtggcac

SEQ ID NO: 2902 - DNA, 41 bp, Homo sapiens
taaaaaaaaaaaaagtctgcytttacagcaattgagccaag

SEQ ID NO: 2903 - DNA, 41 bp, Homo sapiens
aacgaatcctccaaatttttsaacttttatttaatcaaaat

SEQ ID NO: 2904 - DNA, 41 bp, Homo sapiens
tcaaggataataaccaacttrtcaaaaatcagagataatag

SEQ ID NO: 2905 - DNA, 41 bp, Homo sapiens
atttgtttactaatatggaascttcttcaagacatattttt

SEQ ID NO: 2906 - DNA, 41 bp, Homo sapiens
tcatcatgtatttccaggacwcctggcaagatgctcctcag

SEQ ID NO: 2907 - DNA, 41 bp, Homo sapiens
atctccagaggtcctgctgtytccccaaagtccactgaccc

SEQ ID NO: 2908 - DNA, 41 bp, Homo sapiens
ataataaaacaaactgtaggyagaaaaaatgagagtactca

SEQ ID NO: 2909 - DNA, 41 bp, Homo sapiens
tcttaataaaacaaatgagtrtcatacaggtagaggttaaa

SEQ ID NO: 2910 - DNA, 41 bp, Homo sapiens
cagagtttgaactataatackaaggcctgaagtctagcttg

SEQ ID NO: 2911 - DNA, 41 bp, Homo sapiens
gcctgaagtctagcttggatrtatgctacaataatatctgt

SEQ ID NO: 2912 - DNA, 41 bp, Homo sapiens
taattggcaaacataaaaaaacaggtgtctcaaagtcacat

SEQ ID NO: 2913 - DNA, 40 bp, Homo sapiens
taattggcaaacataaaaaacaggtgtctcaaagtcacat

SEQ ID NO: 2914 - DNA, 41 bp, Homo sapiens
gatcagcattacaaccaagagatggagaatgacattcagga

SEQ ID NO: 2915 - DNA, 40 bp, Homo sapiens
gatcagcattacaaccaagaatggagaatgacattcagga

SEQ ID NO: 2916 - DNA, 44 bp, Homo sapiens
  misc_feature (21)..(24): actt is present or absent.
tgtgtgattctatattacttacttgtttcaaatttctctccaca

SEQ ID NO: 2917 - DNA, 44 bp, Homo sapiens
  misc_feature (21)..(24): ttta is present or absent.
ttcaaatttctctccacaaatttatttttctattaaattgtaat

SEQ ID NO: 2918 - DNA, 53 bp, Homo sapiens
  misc_feature (32)..(33): a is present or absent.
acttatttaaaaattcttttaaaaaaaaaaaaacaaaaaacaggatttaaaaa

SEQ ID NO: 2919 - DNA, 50 bp, Homo sapiens
  misc_feature (29)..(30): t is present or absent.
ttgccaagtaattcaagtgcttttttttttgtatttaaaacaacttttca

SEQ ID NO: 2920 - DNA, 54 bp, Homo sapiens
  misc_feature (33)..(34): a is present or absent.
ttcatgggatagtaagtgttaaaaaaaaaaaaaacctctgtgccactatcagta

SEQ ID NO: 2921 - DNA, 46 bp, Homo sapiens
  misc_feature (21)..(26): cttgta is present or absent.
gtgaatataaattacttgtacttgtaaattaaaaaaaaataagtag

SEQ ID NO: 2922 - DNA, 50 bp, Homo sapiens
  misc_feature (30)..(30): a is present or absent.
attacttgtacttgtaaattaaaaaaaaaataagtagaataattaagagt

SEQ ID NO: 2923 - DNA, 43 bp, Homo sapiens
  misc_feature (21)..(23): ctt is present or absent.
ttctctaactccttctactccttatttcaagcagatgcaactg

SEQ ID NO: 2924 - DNA, 43 bp, Homo sapiens
aaattctttatctactttttcttttccctctttctctgctttc

SEQ ID NO: 2925 - DNA, 40 bp, Homo sapiens
aaattctttatctactttttttccctctttctctgctttc

SEQ ID NO: 2926 - DNA, 41 bp, Homo sapiens
  misc_feature (21)..(21): a is present or absent.
aacaagtgagacttcactaaatataatgcaatgtatttgca

SEQ ID NO: 2927 - DNA, 51 bp, Homo sapiens
  misc_feature (30)..(31): a is present or absent.
agcatgacatggtagagatgaaaaaaaaaaagcatttttaacatttgttaa

SEQ ID NO: 2928 - DNA, 43 bp, Homo sapiens
  misc_feature (21)..(23): tgt is present or absent.
tccatcttaatataaaatgttgtctactcaaaaggagaagtct

SEQ ID NO: 2929 - DNA, 67 bp, Homo sapiens
  misc_feature (45)..(47): a is present or absent.
tacgagcactaggtatgatgaaaaaaaaaaaaaaaaaaaaaaaaaaatatatatatatatatatata

SEQ ID NO: 2930 - DNA, 82 bp, Homo sapiens
  misc_feature (41)..(42): ta is present or absent.
  misc_feature (43)..(44): ta is present or absent.
  misc_feature (45)..(46): ta is present or absent.
  misc_feature (47)..(48): ta is present or absent.
  misc_feature (49)..(50): ta is present or absent.
  misc_feature (51)..(52): ta is present or absent.
  misc_feature (53)..(54): ta is present or absent.
  misc_feature (55)..(56): ta is present or absent.
  misc_feature (57)..(58): ta is present or absent.
  misc_feature (59)..(60): ta is present or absent.
  misc_feature (61)..(62): ta is present or absent.
aaaaaaaaaaaaaaaaaaaatatatatatatatatatatatatatatatatatatatatatacacacacacatacatatatt

SEQ ID NO: 2931 - DNA, 50 bp, Homo sapiens
  misc_feature (29)..(30): a is present or absent.
aaaattattcaccacaatacaaaaaaaaaacaaagtaaagttatgaacac

SEQ ID NO: 2932 - DNA, 53 bp, Homo sapiens
  misc_feature (32)..(33): a is present or absent.
aattctcttaaaataatgttaaaaaaaaaaaaagtctgcttttacagcaattg

SEQ ID NO: 2933 - DNA, 50 bp, Homo sapiens
  misc_feature (29)..(30): a is present or absent.
caattatactttacctctttaaaaaaaaaactaatttcaaattcatatat

SEQ ID NO: 2934 - DNA, 41 bp, Homo sapiens
aataggggcttaataactctsaaacttatgatttctcatat

SEQ ID NO: 2935 - DNA, 41 bp, Homo sapiens
gaatttatcctacagatatgrccacacagaaaatgacatat

SEQ ID NO: 2936 - DNA, 41 bp, Homo sapiens
atgaaattagtttaaaaatarcaaccttaactatactcctc

SEQ ID NO: 2937 - DNA, 41 bp, Homo sapiens
acagacttaccaacaaagaaktatccttcccaaaatgtcta

SEQ ID NO: 2938 - DNA, 41 bp, Homo sapiens
actcatggtttgcaaattaastttttaggaaactttatctc

SEQ ID NO: 2939 - DNA, 41 bp, Homo sapiens
ccattctggtgctttctttcrtgaaactattttccatcagt

SEQ ID NO: 2940 - DNA, 41 bp, Homo sapiens
ctcttattgctcttcttccaygttttaatctaaataattta

SEQ ID NO: 2941 - DNA, 41 bp, Homo sapiens
caggaaactttcacaaagccmctaattaatttaagctccct

SEQ ID NO: 2942 - DNA, 41 bp, Homo sapiens
tggtttaatgtaggagagttyaccttcacagttaaattaca

SEQ ID NO: 2943 - DNA, 41 bp, Homo sapiens
aatgtcttgggcatatttgcrttcatttggggcattcagtt

SEQ ID NO: 2944 - DNA, 41 bp, Homo sapiens
atttgcattcatttggggcaytcagttctactagatacaaa

SEQ ID NO: 2945 - DNA, 41 bp, Homo sapiens
gaactggaagtattttgacakctttaccacatttcttcatg

SEQ ID NO: 2946 - DNA, 41 bp, Homo sapiens
agaattttatttttatacttrtaagtgggcagttacctttt

SEQ ID NO: 2947 - DNA, 41 bp, Homo sapiens
tcaatttcatgttgctcttayagttataggtattctaaaga

SEQ ID NO: 2948 - DNA, 41 bp, Homo sapiens
taatcacgtctataaagtttstgatattctttaacaaaatt

SEQ ID NO: 2949 - DNA, 41 bp, Homo sapiens
tattctttaacaaaattgatwtaagaacaaataggaagaac

SEQ ID NO: 2950 - DNA, 41 bp, Homo sapiens
ggtttgaactgcacctgttcrcttatatgcagcttttgtcc

SEQ ID NO: 2951 - DNA, 41 bp, Homo sapiens
tttaacagaataaaaaaaaawattttgtaacgacaaaagaa

SEQ ID NO: 2952 - DNA, 41 bp, Homo sapiens
atatgcaccttaaaaataacstggatttttaaatatgtaat

SEQ ID NO: 2953 - DNA, 41 bp, Homo sapiens
taaatatgtaatgtacataakgaatattatgcatattttgt

SEQ ID NO: 2954 - DNA, 41 bp, Homo sapiens
cattaataatcagaataaaaragaaatttagctcctattta

SEQ ID NO: 2955 - DNA, 41 bp, Homo sapiens
atccaactggggtttagattkcctctttctgcctctcctcc

SEQ ID NO: 2956 - DNA, 41 bp, Homo sapiens
gcctctcctccatctgcaccytctcttttcctcagcaaaca

SEQ ID NO: 2957 - DNA, 41 bp, Homo sapiens
ctatgccctgtaatctcacayttccctttatttaaaattgg

SEQ ID NO: 2958 - DNA, 41 bp, Homo sapiens
tcgtgtctgtgttagcatatrataactcatcagggtttgtg

SEQ ID NO: 2959 - DNA, 41 bp, Homo sapiens
ataacataaatgagtaaagartatcaagggcaggaaattag

SEQ ID NO: 2960 - DNA, 41 bp, Homo sapiens
actactctccccatacacacyaaaactcatgtgctccccag

SEQ ID NO: 2961 - DNA, 41 bp, Homo sapiens
tcatctatggaggactgcaaycattatcattatttcccaga

SEQ ID NO: 2962 - DNA, 41 bp, Homo sapiens
taacaaatgataccagccatsatactattctctggtaatag

SEQ ID NO: 2963 - DNA, 41 bp, Homo sapiens
cctttattttttgagaacctrgtggatgatattaagacgta

SEQ ID NO: 2964 - DNA, 41 bp, Homo sapiens
cctggtggatgatattaagamgtatatagatcactgtaata

SEQ ID NO: 2965 - DNA, 41 bp, Homo sapiens
aaaattatatatatacatatrtaatcttacctaagtattca

SEQ ID NO: 2966 - DNA, 41 bp, Homo sapiens
tgtttttttaagggtagtgaygtgaatagtaaagcgaattt

SEQ ID NO: 2967 - DNA, 41 bp, Homo sapiens
agttgagcaaattgctctcargtagcataatgtcacttgaa

SEQ ID NO: 2968 - DNA, 41 bp, Homo sapiens
gtttattgatccattttttartggatcaacattgtagtgag

SEQ ID NO: 2969 - DNA, 41 bp, Homo sapiens
atttattttgagcaaaggtcrcgactctcttagaaagcctc

SEQ ID NO: 2970 - DNA, 41 bp, Homo sapiens
ttattttgagcaaaggtcgcractctcttagaaagcctcac

SEQ ID NO: 2971 - DNA, 41 bp, Homo sapiens
tgagcaaaggtcgcgactctyttagaaagcctcacaaatca

SEQ ID NO: 2972 - DNA, 41 bp, Homo sapiens
atttgtaactttaagtcttakataacttatatttacaaaat

SEQ ID NO: 2973 - DNA, 41 bp, Homo sapiens
cagatattaatatatattttwttattgaaatatgttatttt

SEQ ID NO: 2974 - DNA, 41 bp, Homo sapiens
acaaaatttctccatcttgtyatatcatcgttgttctgcat

SEQ ID NO: 2975 - DNA, 41 bp, Homo sapiens
aatttctccatcttgtaatawcatcgttgttctgcatttga

SEQ ID NO: 2976 - DNA, 41 bp, Homo sapiens
ttttttttgagatggagtctygctctgttgcccaggctggg

SEQ ID NO: 2977 - DNA, 41 bp, Homo sapiens
aagctccgcctcccaggttckccacccttctcttaaagaaa

SEQ ID NO: 2978 - DNA, 41 bp, Homo sapiens
tccttcttgtttcaacttctrtatttccctctaatctgcga

SEQ ID NO: 2979 - DNA, 41 bp, Homo sapiens
tcacagatttgatttaataawtacttatcaaatcttcctat

SEQ ID NO: 2980 - DNA, 41 bp, Homo sapiens
cttgcccaatatcctaccaaygtattattaaacggcatgga

SEQ ID NO: 2981 - DNA, 41 bp, Homo sapiens
tcctagtttccttgaagatargctacaactttagtaaactt

SEQ ID NO: 2982 - DNA, 41 bp, Homo sapiens
tccctggtcctgtgttgtccwgtagtgaagacctgaaagag

SEQ ID NO: 2983 - DNA, 41 bp, Homo sapiens
cctggtcctgtgttgtccagyagtgaagacctgaaagagag

SEQ ID NO: 2984 - DNA, 41 bp, Homo sapiens
cccattttcatgagtggctargttttgtcccgtttcaaact

SEQ ID NO: 2985 - DNA, 41 bp, Homo sapiens
ccattttcatgagtggctaarttttgtcccgtttcaaacta

SEQ ID NO: 2986 - DNA, 41 bp, Homo sapiens
gtattttggaaagaaaatgtrggtggaagagaaatatttta

SEQ ID NO: 2987 - DNA, 41 bp, Homo sapiens
atatacagaatttcatacacyaatttcttaaattcctaaat

SEQ ID NO: 2988 - DNA, 41 bp, Homo sapiens
taaatattttagtttgagacktctttaaatataatggaatg

SEQ ID NO: 2989 - DNA, 41 bp, Homo sapiens
tgtatttggcaaatgtatttkttaatatttcaaaaactatt

SEQ ID NO: 2990 - DNA, 41 bp, Homo sapiens
cagaacagaaattactcagcrcacttgggtgaatgcccaag

SEQ ID NO: 2991 - DNA, 41 bp, Homo sapiens
tttcttagaattattttgatmtttcaataacatcattaata

SEQ ID NO: 2992 - DNA, 41 bp, Homo sapiens
aaaaaactgcattttagtggsttagctagaaaagatttgtc

SEQ ID NO: 2993 - DNA, 41 bp, Homo sapiens
ggttagctagaaaagatttgkctcatatacacaataaatta

SEQ ID NO: 2994 - DNA, 41 bp, Homo sapiens
caacagaggatcaatgtaaakgaaatctcttaaattaaaca

SEQ ID NO: 2995 - DNA, 41 bp, Homo sapiens
ataaatattaatgttaaataytaaagactgaatgcaattaa

SEQ ID NO: 2996 - DNA, 41 bp, Homo sapiens
taaaatgaatcggtaaaacaktcatgtataaatcactgtca

SEQ ID NO: 2997 - DNA, 41 bp, Homo sapiens
ataggcatataatactctttmttccctctgtatatagggag

SEQ ID NO: 2998 - DNA, 41 bp, Homo sapiens
aacagctgtggagcacaaggrgcttgtaggatatataattc

SEQ ID NO: 2999 - DNA, 44 bp, Homo sapiens
  misc_feature (21)..(24): tatc is present or absent.
atatacataacatatacctatatctatgttatgtgtctgcttat

SEQ ID NO: 3000 - DNA, 58 bp, Homo sapiens
  misc_feature (21)..(38): atattcactt ggtatctg is present or absent.
agcatcagcaacaattaaaaatattcacttggtatctgtagtttaataatggaccaac

SEQ ID NO: 3001 - DNA, 44 bp, Homo sapiens
  misc_feature (21)..(24): ttta is present or absent.
tattcacttggtatctgtagtttaataatggaccaacatcaaca

SEQ ID NO: 3002 - DNA, 41 bp, Homo sapiens
cctgttcgcttatatgcagctttttgtccaaccaaacagaa

SEQ ID NO: 3003 - DNA, 40 bp, Homo sapiens
cctgttcgcttatatgcagcttttgtccaaccaaacagaa

SEQ ID NO: 3004 - DNA, 41 bp, Homo sapiens
  misc_feature (21)..(21): g is present or absent.
tataactttctctttataaagatgcaaaatgttatagcatt

SEQ ID NO: 3005 - DNA, 41 bp, Homo sapiens
  misc_feature (21)..(21): a is present or absent.
aaaaataaatgaagtggaggaaaaaaaatgatttcaagttt

SEQ ID NO: 3006 - DNA, 51 bp, Homo sapiens
  misc_feature (30)..(31): a is presesnt or absent.
acatccatgtttaacagaataaaaaaaaaaatattttgtaacgacaaaaga

SEQ ID NO: 3007 - DNA, 41 bp, Homo sapiens
  misc_feature (21)..(21): g is present or absent.
gagattgtttaaccaaattaggaaactattattcaacacac

SEQ ID NO: 3008 - DNA, 50 bp, Homo sapiens
  misc_feature (29)..(30): at is present or absent.
ttttatatatgaattaaaatatatatatatcatatataatcttacctaag

SEQ ID NO: 3009 - DNA, 48 bp, Homo sapiens
  misc_feature (28)..(28): t is present or absent.
attttctatattatgaactgttttttttaagggtagtgatgtgaatag

SEQ ID NO: 3010 - DNA, 63 bp, Homo sapiens
  misc_feature (40)..(43): t is present or absent.
tagtgtgccacccttctctctttttttttttttttttttttttgagatggagtctcgctctgt

SEQ ID NO: 3011 - DNA, 41 bp, Homo sapiens
  misc_feature (21)..(21): t is present or absent.
ttctttcttaactcaaaggcttttttttttccatgtgacac

SEQ ID NO: 3012 - DNA, 44 bp, Homo sapiens
  misc_feature (21)..(24): tgat is present or absent.
aaaaatcttaaggcacacactgattgacagttgccttgattgta

SEQ ID NO: 3013 - DNA, 50 bp, Homo sapiens
  misc_feature (29)..(30): t is present or absent.
aaataaattgttggcatctattttttttttatttttctaagggtcgctgt

SEQ ID NO: 3014 - DNA, 41 bp, Homo sapiens
  misc_feature (21)..(21): a is present or absent.
gagaaaagcctgatgcctttaaaaaaaaatgaaacactttg

SEQ ID NO: 3015 - DNA, 41 bp, Homo sapiens
gcagctcggactcagctcccrgagcaacccagctgcggagg

SEQ ID NO: 3016 - DNA, 41 bp, Homo sapiens
gaaggcctcagcccccagccrctgggctgggcctggcccaa

SEQ ID NO: 3017 - DNA, 41 bp, Homo sapiens
caatagaacaaccttttctcrggctcatgccgccctgaccc

SEQ ID NO: 3018 - DNA, 41 bp, Homo sapiens
ttctctggcttcccccactcmgttctccagcctgcctgctc

SEQ ID NO: 3019 - DNA, 41 bp, Homo sapiens
gagacttcccatgataacctyccagggcttcacccccaaac

SEQ ID NO: 3020 - DNA, 41 bp, Homo sapiens
gaaccagatgcccccagcctygactcagtcccagtctccac

SEQ ID NO: 3021 - DNA, 55 bp, Homo sapiens
  misc_feature (34)..(35): a is present or absent.
ggaagatgggggcctttgttaaaaaaaaaaaaaaagtacatggagaaattaactg

SEQ ID NO: 3022 - DNA, 55 bp, Homo sapiens
  misc_feature (33)..(35): a is present or absent.
aataggttgaggaggagcagaaaaaaaaaaaaaaatcaagagtgtggagggggca

SEQ ID NO: 3023 - DNA, 41 bp, Homo sapiens
ttgacctccaaaagtgtttgrattacaggcatgggccattg

SEQ ID NO: 3024 - DNA, 41 bp, Homo sapiens
gtgtgtgtgagcatgcatatmtgtgtgtggtggggagtggg

SEQ ID NO: 3025 - DNA, 41 bp, Homo sapiens
ccacatccatcattcgagacmaactcgtctcagctgccatg

SEQ ID NO: 3026 - DNA, 41 bp, Homo sapiens
cacatccatcattcgagacamactcgtctcagctgccatga

SEQ ID NO: 3027 - DNA, 41 bp, Homo sapiens
actagactgctagtgtcctcyggtgagcccagtcccatagg

SEQ ID NO: 3028 - DNA, 41 bp, Homo sapiens
ataaatgtgtacatgagtgtrtgaacacaaatacataaggt

SEQ ID NO: 3029 - DNA, 41 bp, Homo sapiens
tgtagcagcccacatcgccartgttcacacctgagagagag

SEQ ID NO: 3030 - DNA, 41 bp, Homo sapiens
ctgtgtcagagacacagacasggaggtcctggctgccccag

SEQ ID NO: 3031 - DNA, 41 bp, Homo sapiens
ttcctgagaggcaaatccccytcccctactcgggaggtgcc

SEQ ID NO: 3032 - DNA, 41 bp, Homo sapiens
cctgcccacagctctggctcrtcttgccccagtgccatgac

SEQ ID NO: 3033 - DNA, 41 bp, Homo sapiens
cctgtccaccactgtcgcccrccccacaatgcctccacagg

SEQ ID NO: 3034 - DNA, 41 bp, Homo sapiens
gcaccaagacccttggcttcytcccactcagagtccaagca

SEQ ID NO: 3035 - DNA, 41 bp, Homo sapiens
gctcatcctctctggtccttktgccccagcacaggttcctc

SEQ ID NO: 3036 - DNA, 41 bp, Homo sapiens
tctgctccacccgtgcacccscaaagaggcaaagagctggg

SEQ ID NO: 3037 - DNA, 41 bp, Homo sapiens
tggcgttggctgcagttaacwgtgtccattcccttcttcgt

SEQ ID NO: 3038 - DNA, 41 bp, Homo sapiens
tcgaagtacaaaggaaagttyaaagagaagcctgagcctgg

SEQ ID NO: 3039 - DNA, 41 bp, Homo sapiens
gaccaatgggtttcagactcraagacaaaaattatgtttat

SEQ ID NO: 3040 - DNA, 41 bp, Homo sapiens
gcccacgtcagacatgaccartcaatcacagcactttctcc

SEQ ID NO: 3041 - DNA, 41 bp, Homo sapiens
attgtcctgtcctctacccargggagccatcctttatgaac

SEQ ID NO: 3042 - DNA, 41 bp, Homo sapiens
tacatttggtccccaggggggagcggctgatcaggagagaa

SEQ ID NO: 3043 - DNA, 40 bp, Homo sapiens
tacatttggtccccagggggagcggctgatcaggagagaa

SEQ ID NO: 3044 - DNA, 42 bp, Homo sapiens
  misc_feature (21)..(22): aa is present or absent.
tctgacttggactgggcaaaaagtatggtggtatctggatag

SEQ ID NO: 3045 - DNA, 41 bp, Homo sapiens
cagggatcctcattctgagcscgaggcgagggggactcgca

SEQ ID NO: 3046 - DNA, 41 bp, Homo sapiens
  misc_feature (21)..(21): g is present or absent.
cggtcccgactgccgcgggggaaggcgtcggaaccgcttag

SEQ ID NO: 3047 - DNA, 53 bp, Homo sapiens
  misc_feature (32)..(33): t is present or absent.
ttttgaactgaagaacttactttttttttttttataacgaacgttgacatctt

SEQ ID NO: 3048 - DNA, 41 bp, Homo sapiens
gcatgcagcttagaagttttrttttatgagggtctctaacc

SEQ ID NO: 3049 - DNA, 41 bp, Homo sapiens
  misc_feature (21)..(21): a is present or absent.
ggtacgtttttcagaatttaatttggaagctcttccagttc

SEQ ID NO: 3050 - DNA, 41 bp, Homo sapiens
tcagctctttagtgagacttstaaattttctaagacaagca

SEQ ID NO: 3051 - DNA, 51 bp, Homo sapiens
  misc_feature (30)..(31): t is present or absent.
agcatagtggacaagcagtatttttttttttaaacgtgaagagcagaagct

SEQ ID NO: 3052 - DNA, 41 bp, Homo sapiens
tactgtaagacaatatgttaytgttttttgtcttgctaaac

SEQ ID NO: 3053 - DNA, 41 bp, Homo sapiens
ttgggacccacatagagtcaytacttaaaataaatgaccag

SEQ ID NO: 3054 - DNA, 41 bp, Homo sapiens
  misc_feature (21)..(21): t is present or absent.
aggaatgtgctttttaaaactagatggtgttagtcaaggag

SEQ ID NO: 3055 - DNA, 41 bp, Homo sapiens
gacttttataattttgtatarctgatattataggaatacac

SEQ ID NO: 3056 - DNA, 41 bp, Homo sapiens
  misc_feature (21)..(21): t is present or absent.
aaagagttatgttttttttttctgcatctgatattatatgg

SEQ ID NO: 3057 - DNA, 41 bp, Homo sapiens
ttgtctttttatttattcatytaaacttctgttttctgggg

SEQ ID NO: 3058 - DNA, 41 bp, Homo sapiens
ccttccaaacctttacttaasattgtctgttttggtcataa

SEQ ID NO: 3059 - DNA, 41 bp, Homo sapiens
cataaattgtcagtcaaactrcatgttaatagaggacttca

SEQ ID NO: 3060 - DNA, 41 bp, Homo sapiens
  misc_feature (21)..(21): t is present or absent.
aggacttcaggttttttttttaaatactttttcataactat

SEQ ID NO: 3061 - DNA, 41 bp, Homo sapiens
cccttccactacatgggcctrtgttaccatgtggaattatc

SEQ ID NO: 3062 - DNA, 41 bp, Homo sapiens
aactccaggttgcaaatagaygtttctggtattttaagtag

SEQ ID NO: 3063 - DNA, 41 bp, Homo sapiens
ttttgaaagccctcctagcakttctttaatttctttattga

SEQ ID NO: 3064 - DNA, 41 bp, Homo sapiens
agataaattgatgaattattyactctgtgctgctgatagat

SEQ ID NO: 3065 - DNA, 44 bp, Homo sapiens
taaaaagaatttctaaaagaaagaccttttttttgaataactct

SEQ ID NO: 3066 - DNA, 40 bp, Homo sapiens
taaaaagaatttctaaaagaccttttttttgaataactct

SEQ ID NO: 3067 - DNA, 41 bp, Homo sapiens
ctgaaatagaaacctttcagwgtaccttgcagagcagtgaa

SEQ ID NO: 3068 - DNA, 41 bp, Homo sapiens
cagtgtcataaagatccagcrgaaatcaaaatgtttcatat

SEQ ID NO: 3069 - DNA, 44 bp, Homo sapiens
  misc_feature (21)..(24): aaaa is present or absent.
tctaaaaaaataaataaataaaaagagaaaattaagtttaagat

SEQ ID NO: 3070 - DNA, 41 bp, Homo sapiens
actcatttattggttcaaagscttcttcaaccttaggatat

SEQ ID NO: 3071 - DNA, 41 bp, Homo sapiens
ttggttcaaagccttcttcarccttaggatatgcattgagg

SEQ ID NO: 3072 - DNA, 41 bp, Homo sapiens
gtttgagacattaacttctarttcaactgaagatgctagtt

SEQ ID NO: 3073 - DNA, 51 bp, Homo sapiens
  misc_feature (30)..(31): t is present or absent.
gaagagcacagtagaaagactttttttttttaaccctagcaatactattga

SEQ ID NO: 3074 - DNA, 41 bp, Homo sapiens
atcagtacaatgtgttgggcrtacaacacttaatttaaaat

SEQ ID NO: 3075 - DNA, 41 bp, Homo sapiens
taatacaaatcatttgaagcrtttactattaaaaaaacaaa

SEQ ID NO: 3076 - DNA, 41 bp, Homo sapiens
ctttgagcacctactgcattwtaagtgctgttaagatgtgg

SEQ ID NO: 3077 - DNA, 41 bp, Homo sapiens
ttaatcacctcaatctttaaygaatttcttgatttttcttt

SEQ ID NO: 3078 - DNA, 41 bp, Homo sapiens
aatcaggatatggggggttcrttctttattctgccacaaat

SEQ ID NO: 3079 - DNA, 41 bp, Homo sapiens
cattttaaaatagtgctttartaggacttggctgttaaagt

SEQ ID NO: 3080 - DNA, 41 bp, Homo sapiens
tggcataggtttaaaaatgtytgttgtaggactcttttcca

SEQ ID NO: 3081 - DNA, 41 bp, Homo sapiens
  misc_feature (21)..(21): a is present or absent.
taaagaaggagaaaaaaaaaactaatctgagactttgcagg

SEQ ID NO: 3082 - DNA, 41 bp, Homo sapiens
ggatgatgctacccaaggaaytgcacacttccagacagtac

SEQ ID NO: 3083 - DNA, 41 bp, Homo sapiens
tcactccattttttaactgtscttcctaaatgtgtggttaa

SEQ ID NO: 3084 - DNA, 41 bp, Homo sapiens
tctttgttacacttcttaaaycggggtatcagataatcttc

SEQ ID NO: 3085 - DNA, 41 bp, Homo sapiens
gaataaaaggatagggacatkggtaagaccactttttccct

SEQ ID NO: 3086 - DNA, 41 bp, Homo sapiens
gcctctcaattttctcatgtktaatagagagaaaaccctgc

SEQ ID NO: 3087 - DNA, 41 bp, Homo sapiens
gactgactggttcataagttsagaaatttcactgtggtgct

SEQ ID NO: 3088 - DNA, 41 bp, Homo sapiens
tgttattaccatagtagttcygtaacacttggccgttgact

SEQ ID NO: 3089 - DNA, 41 bp, Homo sapiens
ttaacctctcttgagtaaaargaatccttcagaaccagagg

SEQ ID NO: 3090 - DNA, 41 bp, Homo sapiens
gtaaaaggaatccttcagaaycagaggggatggtacggacc

SEQ ID NO: 3091 - DNA, 41 bp, Homo sapiens
catacacttctgctccgtttkccctgtcattctgtgagcca

SEQ ID NO: 3092 - DNA, 41 bp, Homo sapiens
tattcatactgtgaaaaaggwgtttcatggtgaagaaattc

SEQ ID NO: 3093 - DNA, 41 bp, Homo sapiens
ccacacctaaatgagattccygttttaaacactctcaagct

SEQ ID NO: 3094 - DNA, 41 bp, Homo sapiens
tgcacatatatactcattgtrgtttttactaggaactagac

SEQ ID NO: 3095 - DNA, 41 bp, Homo sapiens
ctaggaactagaccaaactgrcagtactagaaatcttttta

SEQ ID NO: 3096 - DNA, 41 bp, Homo sapiens
cattgtgctagattaggtgcyggggtaggtatgaaggggca

SEQ ID NO: 3097 - DNA, 41 bp, Homo sapiens
ctccttgccctcctgaaacayataagatctactctttggaa

SEQ ID NO: 3098 - DNA, 41 bp, Homo sapiens
gattatggctgattttcagtktctttttaatatttttctct

SEQ ID NO: 3099 - DNA, 41 bp, Homo sapiens
tctatatttctcgaacggccrtgaattactttcataatcta

SEQ ID NO: 3100 - DNA, 41 bp, Homo sapiens
ttggtccccactccacctgtsatttcattattaaaacaaca

SEQ ID NO: 3101 - DNA, 41 bp, Homo sapiens
ctctatttggcctaacggtaycttggttttcttttacttcc

SEQ ID NO: 3102 - DNA, 41 bp, Homo sapiens
ttgggtcataagagctctctscatggtgtctcaaacagatg

SEQ ID NO: 3103 - DNA, 53 bp, Homo sapiens
  misc_feature (32)..(33): t is present or absent.
tttgtctctgcatacttggctttttttttttttcacagtgaagtctggaatat

SEQ ID NO: 3104 - DNA, 41 bp, Homo sapiens
aataggatacaaatacacaawgatagtgattcagatcctaa

SEQ ID NO: 3105 - DNA, 41 bp, Homo sapiens
taaaatcgtttttattgttaytaggtatataaaatttgcta

SEQ ID NO: 3106 - DNA, 41 bp, Homo sapiens
tctgattttatcactgtttayagattgcttagtcatactca

SEQ ID NO: 3107 - DNA, 41 bp, Homo sapiens
tgttagcctgtagctaaatgyttttcaaatatgtgaacggt

SEQ ID NO: 3108 - DNA, 41 bp, Homo sapiens
atgaggtccgacttttaagayttttgtctacattttcttcc

SEQ ID NO: 3109 - DNA, 41 bp, Homo sapiens
tattgatggagttctttttakaaatggacttttaccttctt

SEQ ID NO: 3110 - DNA, 41 bp, Homo sapiens
gcatttgggtgtctgagagayatatccagaaatatgctatg

SEQ ID NO: 3111 - DNA, 41 bp, Homo sapiens
tttcaagtttatttctgtttktttttttttttttttttttg

SEQ ID NO: 3112 - DNA, 41 bp, Homo sapiens
aatccaaacatctgtactttktagtggacaagatttatgtc

SEQ ID NO: 3113 - DNA, 41 bp, Homo sapiens
gaaaagctactttattcaaarataaaagtattttaagaaaa

SEQ ID NO: 3114 - DNA, 41 bp, Homo sapiens
aagctggagaaaatactaggytttcctcaacagtgatttcc

SEQ ID NO: 3115 - DNA, 41 bp, Homo sapiens
tttggaggggaactaatcccrtgacttctaggttatctctt

SEQ ID NO: 3116 - DNA, 41 bp, Homo sapiens
ttcacccctcattttaggttrggggaggtggcttgctacag

SEQ ID NO: 3117 - DNA, 41 bp, Homo sapiens
cctcattttaggttaggggargtggcttgctacagttttag

SEQ ID NO: 3118 - DNA, 41 bp, Homo sapiens
cgtgaatcattcagtattttrtttaaaaataccagtttgaa

SEQ ID NO: 3119 - DNA, 44 bp, Homo sapiens
catgatttattctctaactaactatgctaagtcaaagattctgc

SEQ ID NO: 3120 - DNA, 40 bp, Homo sapiens
catgatttattctctaactatgctaagtcaaagattctgc

SEQ ID NO: 3121 - DNA, 41 bp, Homo sapiens
acaatgaaaattaagaaaggwgaagagggaagaagcagaga

SEQ ID NO: 3122 - DNA, 41 bp, Homo sapiens
tacaagacacaggcatctttractagtttactgggatctct

SEQ ID NO: 3123 - DNA, 41 bp, Homo sapiens
ggctttgacttcggaaacctktgggttataacaaagtactg

SEQ ID NO: 3124 - DNA, 41 bp, Homo sapiens
gacattggtgaaaaccagggytgtttaggagtgtcctgtcc

SEQ ID NO: 3125 - DNA, 43 bp, Homo sapiens
  misc_feature (21)..(23): gtg is present or absent.
catctgagatttgccttgtggtgtttaccgagttagtgggtgc

SEQ ID NO: 3126 - DNA, 41 bp, Homo sapiens
gatacatgaacaatttgtttyatcctcatgatatctttcaa

SEQ ID NO: 3127 - DNA, 41 bp, Homo sapiens
taaaggccacaatgcagtgaytgaaatctccagttacattt

SEQ ID NO: 3128 - DNA, 41 bp, Homo sapiens
tttccttagtccttccatcaygaaactaaagctgtcttcca

SEQ ID NO: 3129 - DNA, 41 bp, Homo sapiens
tttatatctccacttttgatrggacactagcaaaagatatt

SEQ ID NO: 3130 - DNA, 52 bp, Homo sapiens
  misc_feature (32)..(32): t is present or absent.
accatctcattcagtgattcttttttttttttccctccacttgttgccaggc

SEQ ID NO: 3131 - DNA, 41 bp, Homo sapiens
ttttttttccctccacttgtygccaggcagagctgctttcc

SEQ ID NO: 3132 - DNA, 41 bp, Homo sapiens
cagattgcttgaatttcagcmccagcttggaatttgcagag

SEQ ID NO: 3133 - DNA, 41 bp, Homo sapiens
gatttctgtgaaaattgagargatctggcaacctggggctc

SEQ ID NO: 3134 - DNA, 41 bp, Homo sapiens
ggcccctccccaggcaaagcrgtgagaacatggctgtttcc

SEQ ID NO: 3135 - DNA, 41 bp, Homo sapiens
tggagcgggccaagaggcgcrtagtggggagtccctttgac

SEQ ID NO: 3136 - DNA, 41 bp, Homo sapiens
aaccagtctggacagatcccytgtagcttgtgaaagtgtag

SEQ ID NO: 3137 - DNA, 41 bp, Homo sapiens
tagcttgtgaaagtgtaggargtgaagggctggctcacttc

SEQ ID NO: 3138 - DNA, 41 bp, Homo sapiens
tctgaaggcctcgtgtacttyagtggggtggggagggccac

SEQ ID NO: 3139 - DNA, 41 bp, Homo sapiens
aatttttgcctctttttactrtcaatacaacttgctaagtt

SEQ ID NO: 3140 - DNA, 43 bp, Homo sapiens
  misc_feature (21)..(23): tta is present or absent.
ctatgtgcttatgattattattagccaacagaacaatcagaat

SEQ ID NO: 3141 - DNA, 41 bp, Homo sapiens
ctaaatgtgggtcactgggaygttaaccaggagagagaatc

SEQ ID NO: 3142 - DNA, 41 bp, Homo sapiens
ctttacatctgtgcaagagarggacaaggagcaaatcagcc

SEQ ID NO: 3143 - DNA, 41 bp, Homo sapiens
gtaaacttgcattgaaatgtrgaaagcaggtaaaggaatga

SEQ ID NO: 3144 - DNA, 41 bp, Homo sapiens
tggggaataccaaaagcaacyaaagttcaccagaaaagggg

SEQ ID NO: 3145 - DNA, 41 bp, Homo sapiens
aaacttctaaaagaaataccrtgccagtcagattatgtgct

SEQ ID NO: 3146 - DNA, 41 bp, Homo sapiens
catacattcaacaaacatttygtggagcacatgctactata

SEQ ID NO: 3147 - DNA, 41 bp, Homo sapiens
gatagggaagatcactgtgarctggaaaaatctgggaaacc

SEQ ID NO: 3148 - DNA, 41 bp, Homo sapiens
catcttgtctagattgcatgyttgtttgtttgtttgtctct

SEQ ID NO: 3149 - DNA, 41 bp, Homo sapiens
ctacttacccccaaaacatgwtttctctttcttaaatgacc

SEQ ID NO: 3150 - DNA, 41 bp, Homo sapiens
ccagagtgactccagtatacmtcactgcccaggacccacag

SEQ ID NO: 3151 - DNA, 41 bp, Homo sapiens
cacttgaaagcaaccataatygtgaggtttctgatgctgta

SEQ ID NO: 3152 - DNA, 41 bp, Homo sapiens
ttgctttaagcgaaatgaacyatacggacaggagaacagcc

SEQ ID NO: 3153 - DNA, 41 bp, Homo sapiens
acaggaacacttagacatgcracccactcccaccctccgtc

SEQ ID NO: 3154 - DNA, 41 bp, Homo sapiens
cccaccctccgtcttggggggaggaaagcacactactgtcc

SEQ ID NO: 3155 - DNA, 40 bp, Homo sapiens
cccaccctccgtcttgggggaggaaagcacactactgtcc

SEQ ID NO: 3156 - DNA, 41 bp, Homo sapiens
actgtcccaaagaactaataactgaaccagtgctgccttgt

SEQ ID NO: 3157 - DNA, 40 bp, Homo sapiens
actgtcccaaagaactaatactgaaccagtgctgccttgt

SEQ ID NO: 3158 - DNA, 43 bp, Homo sapiens
  misc_feature (21)..(23): cct is present or absent.
ttaaagttttaaaaaaacttccttaaaaactactcatgagatg

SEQ ID NO: 3159 - DNA, 41 bp, Homo sapiens
catcccaggacttgctgttcscaggtgataaactgcacctc

SEQ ID NO: 3160 - DNA, 41 bp, Homo sapiens
aactgcacctccccaggactmccgctgcactcacatgcagc

SEQ ID NO: 3161 - DNA, 41 bp, Homo sapiens
tttgggccgggaacaattttycaaggttgtaaagccaaatt

SEQ ID NO: 3162 - DNA, 41 bp, Homo sapiens
acctgggatattcctgacccmatctggttttcttttaccca

SEQ ID NO: 3163 - DNA, 41 bp, Homo sapiens
atagagactggaagtcatcaygtgcagttcaccgcttctga

SEQ ID NO: 3164 - DNA, 41 bp, Homo sapiens
cgtgctccactgagctcctckgtcacaccccattcttgccc

SEQ ID NO: 3165 - DNA, 41 bp, Homo sapiens
tgcagctgtaaaaagaaatcygtaaatggtgaccgtactac

SEQ ID NO: 3166 - DNA, 41 bp, Homo sapiens
cagtgttagccagccgatatyggtcaaggctgccccgctcg

SEQ ID NO: 3167 - DNA, 41 bp, Homo sapiens
ccattatcccctttccccggyctcagctgtgcactccaggc

SEQ ID NO: 3168 - DNA, 41 bp, Homo sapiens
aacttacccctctatccagcwctatccagaaggacaccagg

SEQ ID NO: 3169 - DNA, 43 bp, Homo sapiens
  misc_feature (21)..(23): gga is present or absent.
acggaggcctcaaaacaggaggaaaataaggagacccctcccc

SEQ ID NO: 3170 - DNA, 40 bp, Homo sapiens
acggaggcctcaaaacaggaaaataaggagacccctcccc

SEQ ID NO: 3171 - DNA, 41 bp, Homo sapiens
gcacagcttttgtcaggagtycgtgcctccggtctttgttc

SEQ ID NO: 3172 - DNA, 41 bp, Homo sapiens
gccttaactttccccaccttkggcttctcttgatttttgct

SEQ ID NO: 3173 - DNA, 41 bp, Homo sapiens
gtacaggatttcaaaatactrtatatagaaaccagacagta

SEQ ID NO: 3174 - DNA, 41 bp, Homo sapiens
cctgttgtcttggtgggtgcrcaacctttgccagttaaagg

SEQ ID NO: 3175 - DNA, 41 bp, Homo sapiens
agaggatagaagtcccttctratttagagggcctctttctt

SEQ ID NO: 3176 - DNA, 41 bp, Homo sapiens
tgaaaacatattctttttgartttagctgagtggcctgttg

SEQ ID NO: 3177 - DNA, 41 bp, Homo sapiens
cctgagacaccttacagctcygtcctgcttccatgtcattc

SEQ ID NO: 3178 - DNA, 41 bp, Homo sapiens
tttcatctttctacaaatggscccctcttcctggctgcact

SEQ ID NO: 3179 - DNA, 54 bp, Homo sapiens
  misc_feature (33)..(34): t is present or absent.
gcttcagaggtttttgtgggttttttttttttttaacattctatcaacttttaa

SEQ ID NO: 3180 - DNA, 41 bp, Homo sapiens
ccaaaagccctctcttttaayatgacattaataagacaatt

SEQ ID NO: 3181 - DNA, 41 bp, Homo sapiens
caagatggataagacgtcacytaaggtccttagcatgttga

SEQ ID NO: 3182 - DNA, 41 bp, Homo sapiens
ctctaagtaattcaattatgkatgaccaaaggataaggaaa

SEQ ID NO: 3183 - DNA, 41 bp, Homo sapiens
cagggcctgggctagctgcgygaattggcatgtggttctca

SEQ ID NO: 3184 - DNA, 57 bp, Homo sapiens
  misc_feature (37)..(37): t is present or absent.
aggaaaggttttcttttttctttttttttttttttttatcaattatttggacctgga

SEQ ID NO: 3185 - DNA, 41 bp, Homo sapiens
cgtgtgcagagtaggcttggrttttatcttgcccatgagtt

SEQ ID NO: 3186 - DNA, 41 bp, Homo sapiens
actcggtagagtcactcctgmctggtgtcccacatccactc

SEQ ID NO: 3187 - DNA, 41 bp, Homo sapiens
accatggggtatgggaaaaamgatcacggtcctggttttgt

SEQ ID NO: 3188 - DNA, 41 bp, Homo sapiens
gctcagcttcttgaccaagtkgttgtctataggcagttgag

SEQ ID NO: 3189 - DNA, 41 bp, Homo sapiens
ggcccggttgtaggggaggakatctcctttctggcctttga

SEQ ID NO: 3190 - DNA, 41 bp, Homo sapiens
ccacatgttccccgggtgagrgtagctccctcccagggtaa

SEQ ID NO: 3191 - DNA, 41 bp, Homo sapiens
gccagaagtagatgcccccarttcagctgctgcattactgg

SEQ ID NO: 3192 - DNA, 41 bp, Homo sapiens
caagtcactgggccgttagcstccgtgcctgcaccttgaag

SEQ ID NO: 3193 - DNA, 41 bp, Homo sapiens
tcactttccacagccacactrgccagcctggccgagaagga

SEQ ID NO: 3194 - DNA, 41 bp, Homo sapiens
agagccccccctgactgtttscctaaggcaccattcccaac

SEQ ID NO: 3195 - DNA, 41 bp, Homo sapiens
ccactccctctccaaatggtrctgccaattcttcttctaag

SEQ ID NO: 3196 - DNA, 41 bp, Homo sapiens
tagagaattttcaggggggggtcaaccaagagggagccaaa

SEQ ID NO: 3197 - DNA, 40 bp, Homo sapiens
tagagaattttcagggggggtcaaccaagagggagccaaa

SEQ ID NO: 3198 - DNA, 41 bp, Homo sapiens
aacagctggtgatgagccaaktttccactttcctttggtga

SEQ ID NO: 3199 - DNA, 41 bp, Homo sapiens
ggggcgtgttatttgacaccygtgagcttttcctttgacag

SEQ ID NO: 3200 - DNA, 41 bp, Homo sapiens
gatgctgttactctccttggrgacagacactgccctgtgga

SEQ ID NO: 3201 - DNA, 41 bp, Homo sapiens
aagagccacacagaaccaccsccctactgggctgttggaat

SEQ ID NO: 3202 - DNA, 41 bp, Homo sapiens
cacctgtaagtggagcggctyagaccaaggatcccaggatg

SEQ ID NO: 3203 - DNA, 41 bp, Homo sapiens
gagaaaggacaggaggaggayacaggctctcaggaaggaaa

SEQ ID NO: 3204 - DNA, 41 bp, Homo sapiens
accattcttatccactaagcrtgtcccccaagatcttattc

SEQ ID NO: 3205 - DNA, 41 bp, Homo sapiens
cgcctccctcgcccctccccmtccagtggacttggcagtgg

SEQ ID NO: 3206 - DNA, 41 bp, Homo sapiens
atccccctggtgtgtgtgaamccatggtgcttgtctagggg

SEQ ID NO: 3207 - DNA, 41 bp, Homo sapiens
gcctacagggtccctctccgygaaaggaatgctgacctgtc

SEQ ID NO: 3208 - DNA, 41 bp, Homo sapiens
actgaggcatgggaggagggsgctattcccagggcagaagg

SEQ ID NO: 3209 - DNA, 41 bp, Homo sapiens
ccagacggagagagcctgggrcaggagaatgtatctccagg

SEQ ID NO: 3210 - DNA, 41 bp, Homo sapiens
ttgacttttgaggccagatayaccgatttcttccaagagaa

SEQ ID NO: 3211 - DNA, 41 bp, Homo sapiens
taaacaatgtgttcctacggrctctccagggagtgtggagt

SEQ ID NO: 3212 - DNA, 41 bp, Homo sapiens
caaacagggtctgccagatgrcatatgcccagcagccaggg

SEQ ID NO: 3213 - DNA, 41 bp, Homo sapiens
agcagccagggaggacctgcsgttgggcgaagcccctgtgt

SEQ ID NO: 3214 - DNA, 41 bp, Homo sapiens
cttttggcccctcagggaggrgaagagcagctcagcagcat

SEQ ID NO: 3215 - DNA, 41 bp, Homo sapiens
ttcttagttcctcatgtttcyctctagaatgttttcgtgtg

SEQ ID NO: 3216 - DNA, 41 bp, Homo sapiens
gattggtcaagtggcatgcayggtttatgccctctctcctg

SEQ ID NO: 3217 - DNA, 41 bp, Homo sapiens
gggtgcgcttttgacaactgstcagtagcgtgttcacaagc

SEQ ID NO: 3218 - DNA, 41 bp, Homo sapiens
tggaatgcgggggctcagccrtggaagacaaggggctcttc

SEQ ID NO: 3219 - DNA, 41 bp, Homo sapiens
tgccaaagaggaggtacaagrgggctgtggcaaggctacga

SEQ ID NO: 3220 - DNA, 41 bp, Homo sapiens
ctctctgattttctaacacamccggtccccgagtcagtcat

SEQ ID NO: 3221 - DNA, 41 bp, Homo sapiens
gtgggttttgccaggaatcarttcaagaacctgtggattca

SEQ ID NO: 3222 - DNA, 41 bp, Homo sapiens
aatattgtgtcattccttccsctggtagttattatggaaac

SEQ ID NO: 3223 - DNA, 41 bp, Homo sapiens
cagtgccaggagccagggggycttctccagatgactctgag

SEQ ID NO: 3224 - DNA, 41 bp, Homo sapiens
ttgtttacattgtatattatrtaccaagccctgtctcagtg

SEQ ID NO: 3225 - DNA, 41 bp, Homo sapiens
agggctccagtacctgtgcckgtggcccctgtgctgtactg

SEQ ID NO: 3226 - DNA, 41 bp, Homo sapiens
cagtgccaggagccagggggwcttctccagatgactctgag

SEQ ID NO: 3227 - DNA, 41 bp, Homo sapiens
ctccaatctgctgacaccccrtcccccccacaccgccgctc

SEQ ID NO: 3228 - DNA, 41 bp, Homo sapiens
tctgtgctaacgtctgcttcyctcatgccccctaggctggc

SEQ ID NO: 3229 - DNA, 41 bp, Homo sapiens
gggctccttcctcaaacatcsgacggcggaatgtggcagat

SEQ ID NO: 3230 - DNA, 41 bp, Homo sapiens
ataggttgtctgtgaaatcgyagtcctgcctggggagggag

SEQ ID NO: 3231 - DNA, 41 bp, Homo sapiens
gtgagcaggaaactgtaggaraaggatattttccctcattt

SEQ ID NO: 3232 - DNA, 41 bp, Homo sapiens
gcctcccagctaccccacccrcctcaggaggggtcattcca

SEQ ID NO: 3233 - DNA, 41 bp, Homo sapiens
aacctagggtgctgagaatcygggtgggattaccagcaaaa

SEQ ID NO: 3234 - DNA, 41 bp, Homo sapiens
acaccacgccctgcaaattgytgggaacttgtcggtggcaa

SEQ ID NO: 3235 - DNA, 41 bp, Homo sapiens
caggagccctgcggctgcccsggttctgtgaaatggcagtg

SEQ ID NO: 3236 - DNA, 41 bp, Homo sapiens
cgcagcgccaggactggcccsccgaggatctggccggccgc

SEQ ID NO: 3237 - DNA, 41 bp, Homo sapiens
ctcaggggctgcgctggagtyccagctccagccactgcgct

SEQ ID NO: 3238 - DNA, 41 bp, Homo sapiens
cagatttttcttaaggtgcastagccactgaggatattttt

SEQ ID NO: 3239 - DNA, 41 bp, Homo sapiens
caattatggtttatcttaggracatgtttatagagatagta

SEQ ID NO: 3240 - DNA, 41 bp, Homo sapiens
atagtattcttacttagcttrcattctaaattttgttccct

SEQ ID NO: 3241 - DNA, 41 bp, Homo sapiens
gtggcattagggtcctggagragggctatagagaagcccag

SEQ ID NO: 3242 - DNA, 41 bp, Homo sapiens
gaggaggagaccggagaggasagccagtccagtcagggccc

SEQ ID NO: 3243 - DNA, 41 bp, Homo sapiens
gtcctactctaacttccactrccgctgctctgggcagcaca

SEQ ID NO: 3244 - DNA, 41 bp, Homo sapiens
gggcccgttcaatagacaagsaaggctaaaggcagggactg

SEQ ID NO: 3245 - DNA, 41 bp, Homo sapiens
taggattctatttctctctcyttcactcgttgattctcctt

SEQ ID NO: 3246 - DNA, 41 bp, Homo sapiens
gtgctctgataggctgtctcmgtcacatgcttcctgctggg

SEQ ID NO: 3247 - DNA, 41 bp, Homo sapiens
ggtcacatggcctgagcggcrgggcggctcagtcacctggg

SEQ ID NO: 3248 - DNA, 41 bp, Homo sapiens
gagggctgcttgcccctgccsgaggacaggctggcagggac

SEQ ID NO: 3249 - DNA, 41 bp, Homo sapiens
ccctggggagcccttgctgtktgggcgcagcaggaagagca

SEQ ID NO: 3250 - DNA, 41 bp, Homo sapiens
tccctcaggctcttgctcacrtgggcccagactccttggct

SEQ ID NO: 3251 - DNA, 41 bp, Homo sapiens
ctggggctgggaaggaggcarggtcctattgctggggatag

SEQ ID NO: 3252 - DNA, 41 bp, Homo sapiens
ggcagggtcctattgctgggratagcaacccactggatctc

SEQ ID NO: 3253 - DNA, 41 bp, Homo sapiens
aaagcccacagggagataagrgtgggagttagggggcaaaa

SEQ ID NO: 3254 - DNA, 41 bp, Homo sapiens
tagggggcaaaacgtcagccrtagtgcgagcagtcttcaag

SEQ ID NO: 3255 - DNA, 41 bp, Homo sapiens
caaggtgtgagggacagtgcrggtctctggagcaatagcca

SEQ ID NO: 3256 - DNA, 41 bp, Homo sapiens
cctgcctgggctactggcttygggggcttcttctcacccac

SEQ ID NO: 3257 - DNA, 41 bp, Homo sapiens
aacgctgaacacttcaggccyggtgcccgagggagacgctt

SEQ ID NO: 3258 - DNA, 41 bp, Homo sapiens
cctagaatcagagagaagccytcccagggagcctgggttca

SEQ ID NO: 3259 - DNA, 41 bp, Homo sapiens
gtccggacaaaccccatgggygtggtacccccagccgtgtt

SEQ ID NO: 3260 - DNA, 41 bp, Homo sapiens
cccagccgtgttgctgtgtcyggcctaccagagtgaggcgt

SEQ ID NO: 3261 - DNA, 41 bp, Homo sapiens
tccggcctaccagagtgaggygtggcagtatggggcctggc

SEQ ID NO: 3262 - DNA, 41 bp, Homo sapiens
aatgttccagaaaatcatgcsaggcagtaagggcagaggaa

SEQ ID NO: 3263 - DNA, 41 bp, Homo sapiens
aaagtaaaggttcaggagaartctagcctggggctgctccc

SEQ ID NO: 3264 - DNA, 41 bp, Homo sapiens
cagggcacccacagcatctgyccagagacctgcaaagacag

SEQ ID NO: 3265 - DNA, 41 bp, Homo sapiens
caggaatgcaaagaaggcaaytaagtgtcttaagaggaagc

SEQ ID NO: 3266 - DNA, 41 bp, Homo sapiens
tcagggtgggaggggagtgargagagaccagctgagcacac

SEQ ID NO: 3267 - DNA, 41 bp, Homo sapiens
ctggctgggctttagcttgcmgaaagctccagaacatcttt

SEQ ID NO: 3268 - DNA, 41 bp, Homo sapiens
aaagaggagagccgggggtgyttgtgccaggggttggggga

SEQ ID NO: 3269 - DNA, 41 bp, Homo sapiens
gcttgtgccaggggttggggraactggttctgattgggcct

SEQ ID NO: 3270 - DNA, 41 bp, Homo sapiens
ctgctgccctccataggtccsagactgaatccttcagagga

SEQ ID NO: 3271 - DNA, 41 bp, Homo sapiens
caggtcttgctttgcagagtktttggcagcggatcctcccc

SEQ ID NO: 3272 - DNA, 41 bp, Homo sapiens
cagctgttagtgaggaagctkcgaggggacgatgaggaggg

SEQ ID NO: 3273 - DNA, 42 bp, Homo sapiens
tggcattttcctctgtctgaaggtcctcttagcccaccctaa

SEQ ID NO: 3274 - DNA, 40 bp, Homo sapiens
tggcattttcctctgtctgagtcctcttagcccaccctaa

SEQ ID NO: 3275 - DNA, 41 bp, Homo sapiens
caccgatggaagtgtgagtgmaggcccagcaccccttctcc

SEQ ID NO: 3276 - DNA, 41 bp, Homo sapiens
atgagccaaagcacgcctatrgtagatacacacgtgaacat

SEQ ID NO: 3277 - DNA, 41 bp, Homo sapiens
ctcaaaatgagtcatttgagrggagttaatgaaagactcat

SEQ ID NO: 3278 - DNA, 41 bp, Homo sapiens
catctgcaaagggagagggarggggtagggacacagacagg

SEQ ID NO: 3279 - DNA, 41 bp, Homo sapiens
tcctgggagaagagagggtgyggccagatgagccgagaaca

SEQ ID NO: 3280 - DNA, 41 bp, Homo sapiens
cgtctaggggtgcgaagccargttatggcgtggtcccaacg

SEQ ID NO: 3281 - DNA, 41 bp, Homo sapiens
tcataggttccagtccccttygcaagcccctcaattctaga

SEQ ID NO: 3282 - DNA, 41 bp, Homo sapiens
ctggttctgcctcagctcagyacagcagaggctgggtctag

SEQ ID NO: 3283 - DNA, 41 bp, Homo sapiens
ggtggtccaggctgctggtgktcagtagggccggccgagcc

SEQ ID NO: 3284 - DNA, 41 bp, Homo sapiens
ttcagcagcctaactgaattracaatagaatagtcctgcaa

SEQ ID NO: 3285 - DNA, 41 bp, Homo sapiens
gggatggggccacctctccayctctggagatgccaggctca

SEQ ID NO: 3286 - DNA, 41 bp, Homo sapiens
aagggcagcctcttgggccaygacccctttgctgtctgcag

SEQ ID NO: 3287 - DNA, 41 bp, Homo sapiens
ctcttgggccatgaccccttygctgtctgcagcaagtgggt

SEQ ID NO: 3288 - DNA, 41 bp, Homo sapiens
gaaggaagcgagggaagatcsaggaaaggagagagggacag

SEQ ID NO: 3289 - DNA, 41 bp, Homo sapiens
cccgcttcccctcaccctggycaggttggcagatctcatgg

SEQ ID NO: 3290 - DNA, 41 bp, Homo sapiens
tcccacccagtgtgagcacaygcagactggcccagccatat

SEQ ID NO: 3291 - DNA, 41 bp, Homo sapiens
gactggcccagccatataggrgaactccaagggcagcacag

SEQ ID NO: 3292 - DNA, 41 bp, Homo sapiens
ccacaactggtggcttggaaygacacctgtttattagcttg

SEQ ID NO: 3293 - DNA, 41 bp, Homo sapiens
cacaactggtggcttggaatracacctgtttattagcttgt

SEQ ID NO: 3294 - DNA, 41 bp, Homo sapiens
acctgcatccagacgagttckggtgttgacagagttcagtt

SEQ ID NO: 3295 - DNA, 41 bp, Homo sapiens
tcgggtgttgacagagttcarttccgtgtggatgcagggct

SEQ ID NO: 3296 - DNA, 41 bp, Homo sapiens
catttatcaaacagccatccrtgtgcttcttgagcacctgc

SEQ ID NO: 3297 - DNA, 41 bp, Homo sapiens
gccaggcattgttgtaaggayttgaggacaattgtatttaa

SEQ ID NO: 3298 - DNA, 41 bp, Homo sapiens
taatctcccagtaacactggmtcagtcaggtccacggtggg

SEQ ID NO: 3299 - DNA, 41 bp, Homo sapiens
cactggatcagtcaggtccasggtgggaaacaagagtaaac

SEQ ID NO: 3300 - DNA, 41 bp, Homo sapiens
tctcatctgtgatgcatccgycagacctctgctcccagcct

SEQ ID NO: 3301 - DNA, 41 bp, Homo sapiens
agaatgactgagtgatcagasctagagagccccagccccgg

SEQ ID NO: 3302 - DNA, 41 bp, Homo sapiens
agccaagcatttcttggggayaccaagaaaccttgcttggt

SEQ ID NO: 3303 - DNA, 41 bp, Homo sapiens
aactccaccctcaccgtccaygcagctccccaggagcgtca

SEQ ID NO: 3304 - DNA, 41 bp, Homo sapiens
tccatgcagctccccaggagygtcagagggcagaggagggg

SEQ ID NO: 3305 - DNA, 41 bp, Homo sapiens
ccgcacagcaggagaatggcyccaagggagggagggacggg

SEQ ID NO: 3306 - DNA, 41 bp, Homo sapiens
tctcctgggtgtgtgtgggggtgtggggcagctcccctatc

SEQ ID NO: 3307 - DNA, 40 bp, Homo sapiens
tctcctgggtgtgtgtggggtgtggggcagctcccctatc

SEQ ID NO: 3308 - DNA, 41 bp, Homo sapiens
tccaggacagaaacagcaggygtgagctgcctctcagaggg

SEQ ID NO: 3309 - DNA, 41 bp, Homo sapiens
atgtcccttatgtggcttccragaccagaagtcctggagag

SEQ ID NO: 3310 - DNA, 41 bp, Homo sapiens
gccacaatctgcagctactcctcccagcttgctgctgggct

SEQ ID NO: 3311 - DNA, 40 bp, Homo sapiens
gccacaatctgcagctactctcccagcttgctgctgggct

SEQ ID NO: 3312 - DNA, 41 bp, Homo sapiens
gaaaaggtgcgtggctggggstggagcagaggaggggctgc

SEQ ID NO: 3313 - DNA, 41 bp, Homo sapiens
aggaggggctgctgtgagtgygcctgggacatggcagtgct

SEQ ID NO: 3314 - DNA, 41 bp, Homo sapiens
gctgctgtgagtgcgcctggracatggcagtgctgtccaca

SEQ ID NO: 3315 - DNA, 42 bp, Homo sapiens
  misc_feature (21)..(22): ct is present or absent.
ctggtgtcatctcccagactctgtcactaaaccacaatatga

SEQ ID NO: 3316 - DNA, 41 bp, Homo sapiens
agcgtcatcacaagcatagcrtggcaggcagcaggcttagg

SEQ ID NO: 3317 - DNA, 42 bp, Homo sapiens
  misc_feature (21)..(22): gc is present or absent.
tggttcactgggacagcagcgcctggctggagggggttggag

SEQ ID NO: 3318 - DNA, 41 bp, Homo sapiens
tcaggtcagcctgggcctgamcatggacaggggccctggag

SEQ ID NO: 3319 - DNA, 41 bp, Homo sapiens
gtcctgtctgggggtcttaasggagtcatgagacttccaca

SEQ ID NO: 3320 - DNA, 41 bp, Homo sapiens
tgatcggggtgcggtttgggkcgacaggacaggagcagaga

SEQ ID NO: 3321 - DNA, 41 bp, Homo sapiens
tcggggtgcggtttggggcgrcaggacaggagcagagaata

SEQ ID NO: 3322 - DNA, 41 bp, Homo sapiens
tgagaagagcagaggggtgtkccgggtgctcgagtcacacc

SEQ ID NO: 3323 - DNA, 41 bp, Homo sapiens
acacctgtgtctgattagggytgattaggggtgcagagttt

SEQ ID NO: 3324 - DNA, 41 bp, Homo sapiens
ttaccctcttcccactcccgytggactgtgagttccatgag

SEQ ID NO: 3325 - DNA, 41 bp, Homo sapiens
cccaggaaccaggaacagtgrggagccatcaccccgccctg

SEQ ID NO: 3326 - DNA, 41 bp, Homo sapiens
tcagtgttaaaacatcatttrtgtatgtatgaaaaatattg

SEQ ID NO: 3327 - DNA, 41 bp, Homo sapiens
actaggattggatggacttgsgatcaggtctcagctctgtc

SEQ ID NO: 3328 - DNA, 41 bp, Homo sapiens
cagctctgtcacctgccaacyggcggccccatttccctcaa

SEQ ID NO: 3329 - DNA, 41 bp, Homo sapiens
ccaggtgggagagccatctgyagcgtggtgacacccatcac

SEQ ID NO: 3330 - DNA, 41 bp, Homo sapiens
gacacccatcacacgggtgcygtgacccggtgcttatgtcg

SEQ ID NO: 3331 - DNA, 41 bp, Homo sapiens
acacccatcacacgggtgccrtgacccggtgcttatgtcgg

SEQ ID NO: 3332 - DNA, 41 bp, Homo sapiens
agccaactgttttcacagacrtggaagaccacatgttcata

SEQ ID NO: 3333 - DNA, 41 bp, Homo sapiens
ccttcgggcctgtcatgatcrtctctcggtttgctgatggg

SEQ ID NO: 3334 - DNA, 41 bp, Homo sapiens
ccatgcattaaaccacccccsacactgagtggcttggaata

SEQ ID NO: 3335 - DNA, 41 bp, Homo sapiens
ataatcagagatttattttastcacggtctaggttcaatga

SEQ ID NO: 3336 - DNA, 41 bp, Homo sapiens
gtcttgcgggaggcttcctcmgcgtggcagcctcggggttg

SEQ ID NO: 3337 - DNA, 41 bp, Homo sapiens
caacccaatcttgcccccggygctgcagcccggcacatttt

SEQ ID NO: 3338 - DNA, 41 bp, Homo sapiens
gggcctggaggagacactccmgccaggaggcactgggggcc

SEQ ID NO: 3339 - DNA, 41 bp, Homo sapiens
atagcagggaggagttggccrtgaagacccaggggcccgtg

SEQ ID NO: 3340 - DNA, 41 bp, Homo sapiens
tgggcccacttatgaatcctscccgagttccctcagctccc

SEQ ID NO: 3341 - DNA, 41 bp, Homo sapiens
tgaatcctccccgagttcccycagctccctcctaaccctag

SEQ ID NO: 3342 - DNA, 41 bp, Homo sapiens
ggggcttcccactgtccagasaaggcggtgggagctgggga

SEQ ID NO: 3343 - DNA, 41 bp, Homo sapiens
attctggggagtcctggcccrctatccactgccagggataa

SEQ ID NO: 3344 - DNA, 41 bp, Homo sapiens
gagagacaggaggaaatgggygtgggtcatctcaggcccca

SEQ ID NO: 3345 - DNA, 41 bp, Homo sapiens
tgggaaacaggtgggaagacrgggattgagctgggtgagcc

SEQ ID NO: 3346 - DNA, 41 bp, Homo sapiens
ggaagcagctcagactccctyagcagatggggccgggccct

SEQ ID NO: 3347 - DNA, 41 bp, Homo sapiens
agggtcggctcagaccccggmgtgctcctggcatgtccagc

SEQ ID NO: 3348 - DNA, 41 bp, Homo sapiens
cggtgggacttgccctagcaygtgccacttataccagaaca

SEQ ID NO: 3349 - DNA, 41 bp, Homo sapiens
gtgggacttgccctagcacgygccacttataccagaacaga

SEQ ID NO: 3350 - DNA, 41 bp, Homo sapiens
acagatgagtccatgtcaacygcttcctgagttccctttgt

SEQ ID NO: 3351 - DNA, 41 bp, Homo sapiens
ctgcctctcagcccacagccrggccgctcacactcctccca

SEQ ID NO: 3352 - DNA, 51 bp, Homo sapiens
  misc_feature (30)..(31): t is present or absent.
cacaaaatgagtttgtggggtttttttttttacacaaaggcggaatcacat

SEQ ID NO: 3353 - DNA, 41 bp, Homo sapiens
accactaatcaactttctgcytctatggatttgcctattct

SEQ ID NO: 3354 - DNA, 41 bp, Homo sapiens
tgctgatctcactgctgtagyggtgctccttatgcatagac

SEQ ID NO: 3355 - DNA, 41 bp, Homo sapiens
ttccttcagctgatgattgaactctcagaattcaaaagaaa

SEQ ID NO: 3356 - DNA, 40 bp, Homo sapiens
ttccttcagctgatgattgactctcagaattcaaaagaaa

SEQ ID NO: 3357 - DNA, 41 bp, Homo sapiens
cccaataaggtgagtggatgrtacatggagaaggagggagg

SEQ ID NO: 3358 - DNA, 41 bp, Homo sapiens
  misc_feature (21)..(21): t is present or absent.
agacatgtgacttttttttttgaaaggtaacaatcactttc

SEQ ID NO: 3359 - DNA, 41 bp, Homo sapiens
agccgtctcgaatgtctcccyacttcataactcctccacac

SEQ ID NO: 3360 - DNA, 41 bp, Homo sapiens
ttttttgcccattactccatrgagatcagaatatcactctg

SEQ ID NO: 3361 - DNA, 41 bp, Homo sapiens; identical to SEQ ID NO: 1003

SEQ ID NO: 3362 - DNA, 41 bp, Homo sapiens; identical to SEQ ID NO: 1004

SEQ ID NO: 3363 - DNA, 41 bp, Homo sapiens; identical to SEQ ID NO: 1005

SEQ ID NO: 3364 - DNA, 41 bp, Homo sapiens; identical to SEQ ID NO: 1006

SEQ ID NO: 3365 - DNA, 41 bp, Homo sapiens; identical to SEQ ID NO: 1007

SEQ ID NO: 3366 - DNA, 41 bp, Homo sapiens; identical to SEQ ID NO: 1008

SEQ ID NO: 3367 - DNA, 41 bp, Homo sapiens; identical to SEQ ID NO: 1009

SEQ ID NO: 3368 - DNA, 41 bp, Homo sapiens; identical to SEQ ID NO: 1010

SEQ ID NO: 3369 - DNA, 41 bp, Homo sapiens; identical to SEQ ID NO: 1011

SEQ ID NO: 3370 - DNA, 41 bp, Homo sapiens; identical to SEQ ID NO: 1012

SEQ ID NO: 3371 - DNA, 41 bp, Homo sapiens; identical to SEQ ID NO: 1013

SEQ ID NO: 3372 - DNA, 41 bp, Homo sapiens; identical to SEQ ID NO: 1014

SEQ ID NO: 3373 - DNA, 41 bp, Homo sapiens; identical to SEQ ID NO: 1015

SEQ ID NO: 3374 - DNA, 41 bp, Homo sapiens; identical to SEQ ID NO: 1016

SEQ ID NO: 3375 - DNA, 41 bp, Homo sapiens; identical to SEQ ID NO: 1017

SEQ ID NO: 3376 - DNA, 41 bp, Homo sapiens; identical to SEQ ID NO: 1019

SEQ ID NO: 3377 - DNA, 41 bp, Homo sapiens; identical to SEQ ID NO: 1020

SEQ ID NO: 3378 - DNA, 41 bp, Homo sapiens; identical to SEQ ID NO: 1024

SEQ ID NO: 3379 - DNA, 41 bp, Homo sapiens; identical to SEQ ID NO: 1025

SEQ ID NO: 3380 - DNA, 41 bp, Homo sapiens; identical to SEQ ID NO: 1026

SEQ ID NO: 3381 - DNA, 41 bp, Homo sapiens; identical to SEQ ID NO: 1027

SEQ ID NO: 3382 - DNA, 41 bp, Homo sapiens; identical to SEQ ID NO: 1028

SEQ ID NO: 3383 - DNA, 41 bp, Homo sapiens; identical to SEQ ID NO: 1029

SEQ ID NO: 3384 - DNA, 41 bp, Homo sapiens; identical to SEQ ID NO: 1030

SEQ ID NO: 3385 - DNA, 41 bp, Homo sapiens; identical to SEQ ID NO: 1031

SEQ ID NO: 3386 - DNA, 41 bp, Homo sapiens; identical to SEQ ID NO: 1032

SEQ ID NO: 3387 - DNA, 41 bp, Homo sapiens; identical to SEQ ID NO: 1033

SEQ ID NO: 3388 - DNA, 41 bp, Homo sapiens; identical to SEQ ID NO: 1034

SEQ ID NO: 3389 - DNA, 41 bp, Homo sapiens; identical to SEQ ID NO: 1035

SEQ ID NO: 3390 - DNA, 41 bp, Homo sapiens; identical to SEQ ID NO: 1037

SEQ ID NO: 3391 - DNA, 41 bp, Homo sapiens; identical to SEQ ID NO: 1038

SEQ ID NO: 3392 - DNA, 41 bp, Homo sapiens; identical to SEQ ID NO: 1039

SEQ ID NO: 3393 - DNA, 41 bp, Homo sapiens; identical to SEQ ID NO: 1040

SEQ ID NO: 3394 - DNA, 41 bp, Homo sapiens; identical to SEQ ID NO: 1041

SEQ ID NO: 3395 - DNA, 41 bp, Homo sapiens; identical to SEQ ID NO: 1042

SEQ ID NO: 3396 - DNA, 41 bp, Homo sapiens; identical to SEQ ID NO: 1043

SEQ ID NO: 3397 - DNA, 41 bp, Homo sapiens; identical to SEQ ID NO: 1044

SEQ ID NO: 3398 - DNA, 41 bp, Homo sapiens; identical to SEQ ID NO: 1045

SEQ ID NO: 3399 - DNA, 41 bp, Homo sapiens; identical to SEQ ID NO: 1046

SEQ ID NO: 3400 - DNA, 41 bp, Homo sapiens; identical to SEQ ID NO: 1047

SEQ ID NO: 3401 - DNA, 41 bp, Homo sapiens; identical to SEQ ID NO: 1048

SEQ ID NO: 3402 - DNA, 41 bp, Homo sapiens; identical to SEQ ID NO: 1049

SEQ ID NO: 3403 - DNA, 41 bp, Homo sapiens; identical to SEQ ID NO: 1050

SEQ ID NO: 3404 - DNA, 41 bp, Homo sapiens; identical to SEQ ID NO: 1051

SEQ ID NO: 3405 - DNA, 41 bp, Homo sapiens; identical to SEQ ID NO: 1052

SEQ ID NO: 3406 - DNA, 41 bp, Homo sapiens; identical to SEQ ID NO: 1053

SEQ ID NO: 3407 - DNA, 41 bp, Homo sapiens; identical to SEQ ID NO: 1054

SEQ ID NO: 3408 - DNA, 41 bp, Homo sapiens; identical to SEQ ID NO: 1055

SEQ ID NO: 3409 - DNA, 41 bp, Homo sapiens; identical to SEQ ID NO: 1056

SEQ ID NO: 3410 - DNA, 41 bp, Homo sapiens; identical to SEQ ID NO: 1057

SEQ ID NO: 3411 - DNA, 41 bp, Homo sapiens; identical to SEQ ID NO: 1058

SEQ ID NO: 3412 - DNA, 41 bp, Homo sapiens; identical to SEQ ID NO: 1059

SEQ ID NO: 3413 - DNA, 41 bp, Homo sapiens; identical to SEQ ID NO: 1060

SEQ ID NO: 3414 - DNA, 41 bp, Homo sapiens; identical to SEQ ID NO: 1062

SEQ ID NO: 3415 - DNA, 41 bp, Homo sapiens; identical to SEQ ID NO: 1063

SEQ ID NO: 3416 - DNA, 41 bp, Homo sapiens; identical to SEQ ID NO: 1064

SEQ ID NO: 3417 - DNA, 41 bp, Homo sapiens; identical to SEQ ID NO: 1065

SEQ ID NO: 3418 - DNA, 41 bp, Homo sapiens; identical to SEQ ID NO: 1066

SEQ ID NO: 3419 - DNA, 41 bp, Homo sapiens; identical to SEQ ID NO: 1067

SEQ ID NO: 3420 - DNA, 41 bp, Homo sapiens; identical to SEQ ID NO: 1068

SEQ ID NO: 3421 - DNA, 41 bp, Homo sapiens; identical to SEQ ID NO: 1069

SEQ ID NO: 3422 - DNA, 41 bp, Homo sapiens; identical to SEQ ID NO: 1070

SEQ ID NO: 3423 - DNA, 41 bp, Homo sapiens; identical to SEQ ID NO: 1071

SEQ ID NO: 3424 - DNA, 41 bp, Homo sapiens; identical to SEQ ID NO: 1072

SEQ ID NO: 3425 - DNA, 41 bp, Homo sapiens; identical to SEQ ID NO: 1073

SEQ ID NO: 3426 - DNA, 41 bp, Homo sapiens; identical to SEQ ID NO: 1074

SEQ ID NO: 3427 - DNA, 41 bp, Homo sapiens; identical to SEQ ID NO: 1075

SEQ ID NO: 3428 - DNA, 41 bp, Homo sapiens; identical to SEQ ID NO: 1077

SEQ ID NO: 3429 - DNA, 41 bp, Homo sapiens; identical to SEQ ID NO: 1078

SEQ ID NO: 3430 - DNA, 41 bp, Homo sapiens; identical to SEQ ID NO: 1079

SEQ ID NO: 3431 - DNA, 41 bp, Homo sapiens; identical to SEQ ID NO: 1080

SEQ ID NO: 3432 - DNA, 41 bp, Homo sapiens; identical to SEQ ID NO: 1081

SEQ ID NO: 3433 - DNA, 41 bp, Homo sapiens; identical to SEQ ID NO: 1082

SEQ ID NO: 3434 - DNA, 41 bp, Homo sapiens; identical to SEQ ID NO: 1083

SEQ ID NO: 3435 - DNA, 41 bp, Homo sapiens; identical to SEQ ID NO: 1084

SEQ ID NO: 3436 - DNA, 41 bp, Homo sapiens; identical to SEQ ID NO: 1085

SEQ ID NO: 3437 - DNA, 41 bp, Homo sapiens; identical to SEQ ID NO: 1086

SEQ ID NO: 3438 - DNA, 41 bp, Homo sapiens; identical to SEQ ID NO: 1087

SEQ ID NO: 3439 - DNA, 41 bp, Homo sapiens; identical to SEQ ID NO: 1088

SEQ ID NO: 3440 - DNA, 41 bp, Homo sapiens; identical to SEQ ID NO: 1089

SEQ ID NO: 3441 - DNA, 41 bp, Homo sapiens; identical to SEQ ID NO: 1090

SEQ ID NO: 3442 - DNA, 41 bp, Homo sapiens; identical to SEQ ID NO: 1091

SEQ ID NO: 3443 - DNA, 41 bp, Homo sapiens; identical to SEQ ID NO: 1092

SEQ ID NO: 3444 - DNA, 41 bp, Homo sapiens; identical to SEQ ID NO: 1093

SEQ ID NO: 3445 - DNA, 41 bp, Homo sapiens; identical to SEQ ID NO: 1094

SEQ ID NO: 3446 - DNA, 41 bp, Homo sapiens; identical to SEQ ID NO: 1095

SEQ ID NO: 3447 - DNA, 41 bp, Homo sapiens; identical to SEQ ID NO: 1096

SEQ ID NO: 3448 - DNA, 41 bp, Homo sapiens; identical to SEQ ID NO: 1097

SEQ ID NO: 3449 - DNA, 41 bp, Homo sapiens; identical to SEQ ID NO: 1098

SEQ ID NO: 3450 - DNA, 41 bp, Homo sapiens; identical to SEQ ID NO: 1099

SEQ ID NO: 3451 - DNA, 41 bp, Homo sapiens; identical to SEQ ID NO: 1100

SEQ ID NO: 3452 - DNA, 41 bp, Homo sapiens; identical to SEQ ID NO: 1101

SEQ ID NO: 3453 - DNA, 41 bp, Homo sapiens; identical to SEQ ID NO: 1102

SEQ ID NO: 3454 - DNA, 41 bp, Homo sapiens; identical to SEQ ID NO: 1103

SEQ ID NO: 3455 - DNA, 41 bp, Homo sapiens; identical to SEQ ID NO: 1104

SEQ ID NO: 3456 - DNA, 41 bp, Homo sapiens; identical to SEQ ID NO: 1107

SEQ ID NO: 3457 - DNA, 41 bp, Homo sapiens; identical to SEQ ID NO: 1108

SEQ ID NO: 3458 - DNA, 41 bp, Homo sapiens; identical to SEQ ID NO: 1109

SEQ ID NO: 3459 - DNA, 41 bp, Homo sapiens; identical to SEQ ID NO: 1110

SEQ ID NO: 3460 - DNA, 41 bp, Homo sapiens; identical to SEQ ID NO: 1111

SEQ ID NO: 3461 - DNA, 41 bp, Homo sapiens; identical to SEQ ID NO: 1112

SEQ ID NO: 3462 - DNA, 41 bp, Homo sapiens; identical to SEQ ID NO: 1113

SEQ ID NO: 3463 - DNA, 41 bp, Homo sapiens; identical to SEQ ID NO: 1114

SEQ ID NO: 3464 - DNA, 41 bp, Homo sapiens; identical to SEQ ID NO: 1115

SEQ ID NO: 3465 - DNA, 41 bp, Homo sapiens; identical to SEQ ID NO: 1116

SEQ ID NO: 3466 - DNA, 41 bp, Homo sapiens; identical to SEQ ID NO: 1117

SEQ ID NO: 3467 - DNA, 41 bp, Homo sapiens; identical to SEQ ID NO: 1118

SEQ ID NO: 3468 - DNA, 41 bp, Homo sapiens; identical to SEQ ID NO: 1119

SEQ ID NO: 3469 - DNA, 41 bp, Homo sapiens; identical to SEQ ID NO: 1120

SEQ ID NO: 3470 - DNA, 41 bp, Homo sapiens; identical to SEQ ID NO: 1121

SEQ ID NO: 3471 - DNA, 41 bp, Homo sapiens; identical to SEQ ID NO: 1122

SEQ ID NO: 3472 - DNA, 41 bp, Homo sapiens; identical to SEQ ID NO: 1123

SEQ ID NO: 3473 - DNA, 41 bp, Homo sapiens; identical to SEQ ID NO: 1124

SEQ ID NO: 3474 - DNA, 41 bp, Homo sapiens; identical to SEQ ID NO: 1125

SEQ ID NO: 3475 - DNA, 41 bp, Homo sapiens; identical to SEQ ID NO: 1126

SEQ ID NO: 3476 - DNA, 41 bp, Homo sapiens; identical to SEQ ID NO: 1127

SEQ ID NO: 3477 - DNA, 41 bp, Homo sapiens; identical to SEQ ID NO: 1128

SEQ ID NO: 3478 - DNA, 41 bp, Homo sapiens; identical to SEQ ID NO: 1129

SEQ ID NO: 3479 - DNA, 41 bp, Homo sapiens; identical to SEQ ID NO: 1130

SEQ ID NO: 3480 - DNA, 41 bp, Homo sapiens; identical to SEQ ID NO: 1131

SEQ ID NO: 3481 - DNA, 41 bp, Homo sapiens; identical to SEQ ID NO: 1133

SEQ ID NO: 3482 - DNA, 41 bp, Homo sapiens; identical to SEQ ID NO: 1134

SEQ ID NO: 3483 - DNA, 41 bp, Homo sapiens; identical to SEQ ID NO: 1135

SEQ ID NO: 3484 - DNA, 41 bp, Homo sapiens; identical to SEQ ID NO: 1136

SEQ ID NO: 3485 - DNA, 41 bp, Homo sapiens; identical to SEQ ID NO: 1137

SEQ ID NO: 3486 - DNA, 41 bp, Homo sapiens; identical to SEQ ID NO: 1138

SEQ ID NO: 3487 - DNA, 41 bp, Homo sapiens; identical to SEQ ID NO: 1139

SEQ ID NO: 3488 - DNA, 41 bp, Homo sapiens; identical to SEQ ID NO: 1140

SEQ ID NO: 3489 - DNA, 41 bp, Homo sapiens; identical to SEQ ID NO: 1141

SEQ ID NO: 3490 - DNA, 41 bp, Homo sapiens; identical to SEQ ID NO: 1142

SEQ ID NO: 3491 - DNA, 41 bp, Homo sapiens; identical to SEQ ID NO: 1143

SEQ ID NO: 3492 - DNA, 41 bp, Homo sapiens; identical to SEQ ID NO: 1144

SEQ ID NO: 3493 - DNA, 41 bp, Homo sapiens; identical to SEQ ID NO: 1145

SEQ ID NO: 3494 - DNA, 41 bp, Homo sapiens; identical to SEQ ID NO: 1146

SEQ ID NO: 3495 - DNA, 41 bp, Homo sapiens; identical to SEQ ID NO: 1147

SEQ ID NO: 3496 - DNA, 41 bp, Homo sapiens; identical to SEQ ID NO: 1148

SEQ ID NO: 3497 - DNA, 41 bp, Homo sapiens; identical to SEQ ID NO: 1149

SEQ ID NO: 3498 - DNA, 41 bp, Homo sapiens; identical to SEQ ID NO: 1150

SEQ ID NO: 3499 - DNA, 41 bp, Homo sapiens; identical to SEQ ID NO: 1151

SEQ ID NO: 3500 - DNA, 41 bp, Homo sapiens; identical to SEQ ID NO: 1152

SEQ ID NO: 3501 - DNA, 41 bp, Homo sapiens; identical to SEQ ID NO: 1153

SEQ ID NO: 3502 - DNA, 41 bp, Homo sapiens; identical to SEQ ID NO: 1154

SEQ ID NO: 3503 - DNA, 41 bp, Homo sapiens; identical to SEQ ID NO: 1155

SEQ ID NO: 3504 - DNA, 41 bp, Homo sapiens; identical to SEQ ID NO: 1156

SEQ ID NO: 3505 - DNA, 41 bp, Homo sapiens; identical to SEQ ID NO: 1157

SEQ ID NO: 3506 - DNA, 41 bp, Homo sapiens; identical to SEQ ID NO: 1159

SEQ ID NO: 3507 - DNA, 41 bp, Homo sapiens; identical to SEQ ID NO: 1160

SEQ ID NO: 3508 - DNA, 41 bp, Homo sapiens; identical to SEQ ID NO: 1162

SEQ ID NO: 3509 - DNA, 41 bp, Homo sapiens; identical to SEQ ID NO: 1163

SEQ ID NO: 3510 - DNA, 42 bp, Homo sapiens; identical to SEQ ID NO: 1164
  misc_feature (21)..(22): at is present or absent.

SEQ ID NO: 3511 - DNA, 40 bp, Homo sapiens; identical to SEQ ID NO: 1165

SEQ ID NO: 3512 - DNA, 41 bp, Homo sapiens; identical to SEQ ID NO: 1166
  misc_feature (21)..(21): c is present or absent.

SEQ ID NO: 3513 - DNA, 41 bp, Homo sapiens; identical to SEQ ID NO: 1167
  misc_feature (21)..(21): t is present or absent.

SEQ ID NO: 3514 - DNA, 41 bp, Homo sapiens; identical to SEQ ID NO: 1168
  misc_feature (21)..(21): t is present or absent.

SEQ ID NO: 3515 - DNA, 41 bp, Homo sapiens; identical to SEQ ID NO: 1169
  misc_feature (21)..(21): g is present or absent.

SEQ ID NO: 3516 - DNA, 40 bp, Homo sapiens; identical to SEQ ID NO: 1170

SEQ ID NO: 3517 - DNA, 41 bp, Homo sapiens; identical to SEQ ID NO: 1171
  misc_feature (21)..(21): c is present or absent.

SEQ ID NO: 3518 - DNA, 40 bp, Homo sapiens; identical to SEQ ID NO: 1172

SEQ ID NO: 3519 - DNA, 41 bp, Homo sapiens; identical to SEQ ID NO: 1173
  misc_feature (21)..(21): t is present or absent.

SEQ ID NO: 3520 - DNA, 40 bp, Homo sapiens; identical to SEQ ID NO: 1174

SEQ ID NO: 3521 - DNA, 41 bp, Homo sapiens
  misc_feature (21)..(21): c is present or absent.
gctgtatattgtgaatgtccngttttcaaaagcaaagccaa

SEQ ID NO: 3522 - DNA, 41 bp, Homo sapiens; identical to SEQ ID NO: 2075

SEQ ID NO: 3523 - DNA, 41 bp, Homo sapiens; identical to SEQ ID NO: 2076

SEQ ID NO: 3524 - DNA, 41 bp, Homo sapiens; identical to SEQ ID NO: 2077

SEQ ID NO: 3525 - DNA, 41 bp, Homo sapiens; identical to SEQ ID NO: 2078

SEQ ID NO: 3526 - DNA, 41 bp, Homo sapiens; identical to SEQ ID NO: 2079

SEQ ID NO: 3527 - DNA, 41 bp, Homo sapiens; identical to SEQ ID NO: 2080

SEQ ID NO: 3528 - DNA, 41 bp, Homo sapiens; identical to SEQ ID NO: 2081

SEQ ID NO: 3529 - DNA, 41 bp, Homo sapiens; identical to SEQ ID NO: 2082

SEQ ID NO: 3530 - DNA, 41 bp, Homo sapiens; identical to SEQ ID NO: 2083

SEQ ID NO: 3531 - DNA, 41 bp, Homo sapiens; identical to SEQ ID NO: 2084

SEQ ID NO: 3532 - DNA, 41 bp, Homo sapiens; identical to SEQ ID NO: 2085

SEQ ID NO: 3533 - DNA, 41 bp, Homo sapiens; identical to SEQ ID NO: 2086

SEQ ID NO: 3534 - DNA, 41 bp, Homo sapiens; identical to SEQ ID NO: 2087

SEQ ID NO: 3535 - DNA, 41 bp, Homo sapiens; identical to SEQ ID NO: 2088

SEQ ID NO: 3536 - DNA, 41 bp, Homo sapiens; identical to SEQ ID NO: 2089

SEQ ID NO: 3537 - DNA, 41 bp, Homo sapiens
tttacccctggaacaggcagrccaagctggcyggtcccctc

SEQ ID NO: 3538 - DNA, 41 bp, Homo sapiens
aacaggcagrccaagctggcyggtcccctccctgatacaca

SEQ ID NO: 3539 - DNA, 41 bp, Homo sapiens; identical to SEQ ID NO: 2092

SEQ ID NO: 3540 - DNA, 41 bp, Homo sapiens; identical to SEQ ID NO: 2093

SEQ ID NO: 3541 - DNA, 41 bp, Homo sapiens; identical to SEQ ID NO: 2094

SEQ ID NO: 3542 - DNA, 41 bp, Homo sapiens; identical to SEQ ID NO: 2095

SEQ ID NO: 3543 - DNA, 41 bp, Homo sapiens
tctgagcctctttccttaacygcagagtgagtggytacaga

SEQ ID NO: 3544 - DNA, 41 bp, Homo sapiens
cttaacygcagagtgagtggytacagagaaatctttactac

SEQ ID NO: 3545 - DNA, 41 bp, Homo sapiens; identical to SEQ ID NO: 2098

SEQ ID NO: 3546 - DNA, 41 bp, Homo sapiens; identical to SEQ ID NO: 2101

SEQ ID NO: 3547 - DNA, 41 bp, Homo sapiens; identical to SEQ ID NO: 2102

SEQ ID NO: 3548 - DNA, 41 bp, Homo sapiens; identical to SEQ ID NO: 2103

SEQ ID NO: 3549 - DNA, 41 bp, Homo sapiens; identical to SEQ ID NO: 2104

SEQ ID NO: 3550 - DNA, 41 bp, Homo sapiens; identical to SEQ ID NO: 2105

SEQ ID NO: 3551 - DNA, 41 bp, Homo sapiens; identical to SEQ ID NO: 2106

SEQ ID NO: 3552 - DNA, 41 bp, Homo sapiens; identical to SEQ ID NO: 2107

SEQ ID NO: 3553 - DNA, 41 bp, Homo sapiens; identical to SEQ ID NO: 2108

SEQ ID NO: 3554 - DNA, 41 bp, Homo sapiens; identical to SEQ ID NO: 2109

SEQ ID NO: 3555 - DNA, 41 bp, Homo sapiens; identical to SEQ ID NO: 2110

SEQ ID NO: 3556 - DNA, 41 bp, Homo sapiens
caaattcctgggaacaaatcrggttgacccagckttattct

SEQ ID NO: 3557 - DNA, 41 bp, Homo sapiens
acaaatcrggttgacccagckttattctccctgtcccatca

SEQ ID NO: 3558 - DNA, 41 bp, Homo sapiens
ggctgtcagagcctacctgcktgaatgggtggaaggrcagg

SEQ ID NO: 3559 - DNA, 41 bp, Homo sapiens
ctgcktgaatgggtggaaggrcaggtctcagagaattgggt

SEQ ID NO: 3560 - DNA, 41 bp, Homo sapiens; identical to SEQ ID NO: 2115

SEQ ID NO: 3561 - DNA, 41 bp, Homo sapiens; identical to SEQ ID NO: 2116

SEQ ID NO: 3562 - DNA, 41 bp, Homo sapiens; identical to SEQ ID NO: 2119

SEQ ID NO: 3563 - DNA, 41 bp, Homo sapiens; identical to SEQ ID NO: 2120

SEQ ID NO: 3564 - DNA, 41 bp, Homo sapiens; identical to SEQ ID NO: 2123

SEQ ID NO: 3565 - DNA, 41 bp, Homo sapiens; identical to SEQ ID NO: 2125

SEQ ID NO: 3566 - DNA, 41 bp, Homo sapiens; identical to SEQ ID NO: 2126

SEQ ID NO: 3567 - DNA, 41 bp, Homo sapiens; identical to SEQ ID NO: 2127

SEQ ID NO: 3568 - DNA, 41 bp, Homo sapiens
ccagaggagaaagctctgccrtagycggcctcagttaacca

SEQ ID NO: 3569 - DNA, 41 bp, Homo sapiens
aggagaaagctctgccrtagycggcctcagttaaccacgga

SEQ ID NO: 3570 - DNA, 41 bp, Homo sapiens; identical to SEQ ID NO: 2130

SEQ ID NO: 3571 - DNA, 41 bp, Homo sapiens; identical to SEQ ID NO: 2131

SEQ ID NO: 3572 - DNA, 41 bp, Homo sapiens; identical to SEQ ID NO: 2132

SEQ ID NO: 3573 - DNA, 41 bp, Homo sapiens; identical to SEQ ID NO: 2133

SEQ ID NO: 3574 - DNA, 41 bp, Homo sapiens; identical to SEQ ID NO: 2140

SEQ ID NO: 3575 - DNA, 41 bp, Homo sapiens; identical to SEQ ID NO: 2143

SEQ ID NO: 3576 - DNA, 41 bp, Homo sapiens; identical to SEQ ID NO: 2144

SEQ ID NO: 3577 - DNA, 41 bp, Homo sapiens
gtaaacacggctgtgggatgmttttacaaacacaatatcgt

SEQ ID NO: 3578 - DNA, 41 bp, Homo sapiens; identical to SEQ ID NO: 2146

SEQ ID NO: 3579 - DNA, 41 bp, Homo sapiens; identical to SEQ ID NO: 2147

SEQ ID NO: 3580 - DNA, 41 bp, Homo sapiens
aacttttgaagaactggaacrygttaggaagttggtcaaag

SEQ ID NO: 3581 - DNA, 41 bp, Homo sapiens
acttttgaagaactggaacrygttaggaagttggtcaaagc

SEQ ID NO: 3582 - DNA, 41 bp, Homo sapiens; identical to SEQ ID NO: 2152

SEQ ID NO: 3583 - DNA, 41 bp, Homo sapiens; identical to SEQ ID NO: 2153

SEQ ID NO: 3584 - DNA, 41 bp, Homo sapiens; identical to SEQ ID NO: 2154

SEQ ID NO: 3585 - DNA, 41 bp, Homo sapiens; identical to SEQ ID NO: 2155

SEQ ID NO: 3586 - DNA, 41 bp, Homo sapiens; identical to SEQ ID NO: 2156

SEQ ID NO: 3587 - DNA, 41 bp, Homo sapiens; identical to SEQ ID NO: 2157

SEQ ID NO: 3588 - DNA, 41 bp, Homo sapiens; identical to SEQ ID NO: 2160

SEQ ID NO: 3589 - DNA, 41 bp, Homo sapiens; identical to SEQ ID NO: 2161

SEQ ID NO: 3590 - DNA, 41 bp, Homo sapiens; identical to SEQ ID NO: 2162

SEQ ID NO: 3591 - DNA, 41 bp, Homo sapiens; identical to SEQ ID NO: 2163

SEQ ID NO: 3592 - DNA, 41 bp, Homo sapiens; identical to SEQ ID NO: 2165

SEQ ID NO: 3593 - DNA, 41 bp, Homo sapiens; identical to SEQ ID NO: 2166

SEQ ID NO: 3594 - DNA, 41 bp, Homo sapiens; identical to SEQ ID NO: 2168

SEQ ID NO: 3595 - DNA, 41 bp, Homo sapiens; identical to SEQ ID NO: 2171

SEQ ID NO: 3596 - DNA, 41 bp, Homo sapiens; identical to SEQ ID NO: 2173

SEQ ID NO: 3597 - DNA, 41 bp, Homo sapiens; identical to SEQ ID NO: 2174

SEQ ID NO: 3598 - DNA, 41 bp, Homo sapiens; identical to SEQ ID NO: 2177

SEQ ID NO: 3599 - DNA, 41 bp, Homo sapiens; identical to SEQ ID NO: 2178

SEQ ID NO: 3600 - DNA, 41 bp, Homo sapiens; identical to SEQ ID NO: 2180

SEQ ID NO: 3601 - DNA, 41 bp, Homo sapiens; identical to SEQ ID NO: 2181

SEQ ID NO: 3602 - DNA, 41 bp, Homo sapiens; identical to SEQ ID NO: 2182

SEQ ID NO: 3603 - DNA, 41 bp, Homo sapiens; identical to SEQ ID NO: 2183

SEQ ID NO: 3604 - DNA, 41 bp, Homo sapiens; identical to SEQ ID NO: 2184

SEQ ID NO: 3605 - DNA, 41 bp, Homo sapiens; identical to SEQ ID NO: 2185

SEQ ID NO: 3606 - DNA, 41 bp, Homo sapiens
agctgctaggaataaaaaggragacaaaacratccacaagc

SEQ ID NO: 3607 - DNA, 41 bp, Homo sapiens
aataaaaaggragacaaaacratccacaagctagagatggt

SEQ ID NO: 3608 - DNA, 41 bp, Homo sapiens; identical to SEQ ID NO: 2188

SEQ ID NO: 3609 - DNA, 41 bp, Homo sapiens; identical to SEQ ID NO: 2189

SEQ ID NO: 3610 - DNA, 41 bp, Homo sapiens; identical to SEQ ID NO: 2190

SEQ ID NO: 3611 - DNA, 41 bp, Homo sapiens; identical to SEQ ID NO: 2195

SEQ ID NO: 3612 - DNA, 41 bp, Homo sapiens; identical to SEQ ID NO: 2199

SEQ ID NO: 3613 - DNA, 41 bp, Homo sapiens; identical to SEQ ID NO: 2200

SEQ ID NO: 3614 - DNA, 41 bp, Homo sapiens; identical to SEQ ID NO: 2201

SEQ ID NO: 3615 - DNA, 41 bp, Homo sapiens; identical to SEQ ID NO: 2202

SEQ ID NO: 3616 - DNA, 41 bp, Homo sapiens; identical to SEQ ID NO: 2203

SEQ ID NO: 3617 - DNA, 41 bp, Homo sapiens
cagagtcagactctggaaagkmggggggataagaacacagc

SEQ ID NO: 3618 - DNA, 41 bp, Homo sapiens
agagtcagactctggaaagkmggggggataagaacacagcc

SEQ ID NO: 3619 - DNA, 41 bp, Homo sapiens
gtattttcatgtaaattatcmratacacagctgctatggaa

SEQ ID NO: 3620 - DNA, 41 bp, Homo sapiens
tattttcatgtaaattatcmratacacagctgctatggaaa

SEQ ID NO: 3621 - DNA, 41 bp, Homo sapiens
ctagacaaaggggmagctccygcccactagaaacttgcagg

SEQ ID NO: 3622 - DNA, 41 bp, Homo sapiens; identical to SEQ ID NO: 2213

SEQ ID NO: 3623 - DNA, 41 bp, Homo sapiens; identical to SEQ ID NO: 2214

SEQ ID NO: 3624 - DNA, 41 bp, Homo sapiens; identical to SEQ ID NO: 2215

SEQ ID NO: 3625 - DNA, 41 bp, Homo sapiens; identical to SEQ ID NO: 2217

SEQ ID NO: 3626 - DNA, 41 bp, Homo sapiens
gttctcagtccggtttcttcrtatcttgcagatttatccrg

SEQ ID NO: 3627 - DNA, 41 bp, Homo sapiens
crtatcttgcagatttatccrggcacctccagcccagcagt

SEQ ID NO: 3628 - DNA, 41 bp, Homo sapiens
tttgtagcctattcctataaraatgcaccattgcttcscat

SEQ ID NO: 3629 - DNA, 41 bp, Homo sapiens
taaraatgcaccattgcttcscattacctccctccacacat

SEQ ID NO: 3630 - DNA, 41 bp, Homo sapiens
acctccctccacacatttttrcaaaaygtttcagggagttt

SEQ ID NO: 3631 - DNA, 41 bp, Homo sapiens
ctccacacatttttrcaaaaygtttcagggagtttactgag

SEQ ID NO: 3632 - DNA, 41 bp, Homo sapiens; identical to SEQ ID NO: 2224

SEQ ID NO: 3633 - DNA, 41 bp, Homo sapiens; identical to SEQ ID NO: 2226

SEQ ID NO: 3634 - DNA, 41 bp, Homo sapiens; identical to SEQ ID NO: 2227

SEQ ID NO: 3635 - DNA, 41 bp, Homo sapiens; identical to SEQ ID NO: 2228

SEQ ID NO: 3636 - DNA, 41 bp, Homo sapiens; identical to SEQ ID NO: 2229

SEQ ID NO: 3637 - DNA, 41 bp, Homo sapiens; identical to SEQ ID NO: 2230

SEQ ID NO: 3638 - DNA, 41 bp, Homo sapiens
gtgtttggttcacacagctcyggagaaaaacaagtcayggc

SEQ ID NO: 3639 - DNA, 41 bp, Homo sapiens
ctcyggagaaaaacaagtcayggcacagccttgacttggga

SEQ ID NO: 3640 - DNA, 41 bp, Homo sapiens; identical to SEQ ID NO: 2233

SEQ ID NO: 3641 - DNA, 41 bp, Homo sapiens; identical to SEQ ID NO: 2234

SEQ ID NO: 3642 - DNA, 41 bp, Homo sapiens; identical to SEQ ID NO: 2235

SEQ ID NO: 3643 - DNA, 41 bp, Homo sapiens
aagtcactaagctggttggtrggaggaacagcacataacyc

SEQ ID NO: 3644 - DNA, 41 bp, Homo sapiens
trggaggaacagcacataacycaccttatctatgctgaggt

SEQ ID NO: 3645 - DNA, 41 bp, Homo sapiens; identical to SEQ ID NO: 2238

SEQ ID NO: 3646 - DNA, 41 bp, Homo sapiens; identical to SEQ ID NO: 2239

SEQ ID NO: 3647 - DNA, 41 bp, Homo sapiens; identical to SEQ ID NO: 2240

SEQ ID NO: 3648 - DNA, 41 bp, Homo sapiens; identical to SEQ ID NO: 2241

SEQ ID NO: 3649 - DNA, 88 bp, Homo sapiens; identical to SEQ ID NO: 2243
  misc_feature (63)..(65): tca is present or absent.
  misc_feature (66)..(68): tca is present or absent.

SEQ ID NO: 3650 - DNA, 50 bp, Homo sapiens; identical to SEQ ID NO: 2244
  misc_feature (29)..(30): a is present or absent.

SEQ ID NO: 3651 - DNA, 49 bp, Homo sapiens
  misc_feature (21)..(29): cacagtcat is present or absent.
ttgttggctttgcaawggatcacagtcatttattcactcattcattcac

SEQ ID NO: 3652 - DNA, 42 bp, Homo sapiens; identical to SEQ ID NO: 2246
  misc_feature (21)..(22): tt is present or absent.

SEQ ID NO: 3653 - DNA, 52 bp, Homo sapiens; identical to SEQ ID NO: 2247
  misc_feature (31)..(32): a is present or absent.

SEQ ID NO: 3654 - DNA, 41 bp, Homo sapiens; identical to SEQ ID NO: 2248
  misc_feature (21)..(21): c is present or absent.

SEQ ID NO: 3655 - DNA, 58 bp, Homo sapiens; identical to SEQ ID NO: 2249
  misc_feature (37)..(38): a is present or absent.

SEQ ID NO: 3656 - DNA, 41 bp, Homo sapiens; identical to SEQ ID NO: 2250
  misc_feature (21)..(21): g is present or absent.

SEQ ID NO: 3657 - DNA, 40 bp, Homo sapiens; identical to SEQ ID NO: 2251

SEQ ID NO: 3658 - DNA, 41 bp, Homo sapiens; identical to SEQ ID NO: 2252
  misc_feature (21)..(21): c is present or absent.

SEQ ID NO: 3659 - DNA, 41 bp, Homo sapiens; identical to SEQ ID NO: 2253
  misc_feature (21)..(21): t is present or absent.

SEQ ID NO: 3660 - DNA, 41 bp, Homo sapiens; identical to SEQ ID NO: 2254
  misc_feature (21)..(21): a is present or absent.

SEQ ID NO: 3661 - DNA, 42 bp, Homo sapiens
  misc_feature (21)..(22): tg is present or absent.
gggccgagtatgcacactgatgtgtgggaaagttagagaasa

SEQ ID NO: 3662 - DNA, 40 bp, Homo sapiens
gggccgagtatgcacactgatgtgggaaagttagagaasa

SEQ ID NO: 3663 - DNA, 53 bp, Homo sapiens; identical to SEQ ID NO: 2257
  misc_feature (31)..(33): t is present or absent.

SEQ ID NO: 3664 - DNA, 66 bp, Homo sapiens; identical to SEQ ID NO: 2258
  misc_feature (43)..(44): gt is present or absent.
  misc_feature (45)..(46): gt is present or absent.

SEQ ID NO: 3665 - DNA, 41 bp, Homo sapiens; identical to SEQ ID NO: 2259
  misc_feature (21)..(21): a is present or absent.

SEQ ID NO: 3666 - DNA, 40 bp, Homo sapiens
  misc_feature (21)..(21): g is present or absent.
catgatcagagtaagggggggtggaggatggggaggggag

SEQ ID NO: 3667 - DNA, 41 bp, Homo sapiens; identical to SEQ ID NO: 2261
  misc_feature (21)..(21): g is present or absent.

SEQ ID NO: 3668 - DNA, 51 bp, Homo sapiens; identical to SEQ ID NO: 2262
  misc_feature (30)..(31): t is present or absent.

SEQ ID NO: 3669 - DNA, 41 bp, Homo sapiens; identical to SEQ ID NO: 2263
  misc_feature (21)..(21): g is present or absent.

SEQ ID NO: 3670 - DNA, 40 bp, Homo sapiens; identical to SEQ ID NO: 2264

SEQ ID NO: 3671 - DNA, 42 bp, Homo sapiens; identical to SEQ ID NO: 2265
  misc_feature (21)..(22): tt is present or absent.

SEQ ID NO: 3672 - DNA, 49 bp, Homo sapiens; identical to SEQ ID NO: 2266
  misc_feature (28)..(29): a is present or absent.

SEQ ID NO: 3673 - DNA, 51 bp, Homo sapiens; identical to SEQ ID NO: 2267
  misc_feature (30)..(31): t is present or absent.

SEQ ID NO: 3674 - DNA, 50 bp, Homo sapiens; identical to SEQ ID NO: 2268
  misc_feature (30)..(30): a is present or absent.

SEQ ID NO: 3675 - DNA, 42 bp, Homo sapiens; identical to SEQ ID NO: 2269
  misc_feature (21)..(22): gt is present or absent.

SEQ ID NO: 3676 - DNA, 41 bp, Homo sapiens; identical to SEQ ID NO: 2270
  misc_feature (21)..(21): a is present or absent.

SEQ ID NO: 3677 - DNA, 41 bp, Homo sapiens
  misc_feature (21)..(21): t is present or absent.
ccttgaccaaagcctgggggtcagccattccccarcccctc

SEQ ID NO: 3678 - DNA, 40 bp, Homo sapiens
ccttgaccaaagcctgggggcagccattccccarcccctc

SEQ ID NO: 3679 - DNA, 41 bp, Homo sapiens; identical to SEQ ID NO: 2273
  misc_feature (21)..(21): a is present or absent.

SEQ ID NO: 3680 - DNA, 42 bp, Homo sapiens; identical to SEQ ID NO: 2274
  misc_feature (21)..(22): ct is present or absent.

SEQ ID NO: 3681 - DNA, 41 bp, Homo sapiens
  misc_feature (21)..(21): g is present or absent.
agactctggaaagkmggggggataagaacacagccccagca

SEQ ID NO: 3682 - DNA, 41 bp, Homo sapiens; identical to SEQ ID NO: 2276
  misc_feature (21)..(21): a is present or absent.

SEQ ID NO: 3683 - DNA, 41 bp, Homo sapiens; identical to SEQ ID NO: 2277
  misc_feature (21)..(21): a is present or absent.

SEQ ID NO: 3684 - DNA, 41 bp, Homo sapiens
  misc_feature (21)..(21): a is present or absent.
tgtagcctattcctataaraatgcaccattgcttcscatta

SEQ ID NO: 3685 - DNA, 41 bp, Homo sapiens; identical to SEQ ID NO: 2279
  misc_feature (21)..(21): c is present or absent.

SEQ ID NO: 3686 - DNA, 44 bp, Homo sapiens; identical to SEQ ID NO: 2280
  misc_feature (21)..(24): aaag is present or absent.

SEQ ID NO: 3687 - DNA, 41 bp, Homo sapiens
agaatgttggccccctccccytyctgcatcctctgcagaag

SEQ ID NO: 3688 - DNA, 41 bp, Homo sapiens
aatgttggccccctccccytyctgcatcctctgcagaagcc

SEQ ID NO: 3689 - DNA, 41 bp, Homo sapiens; identical to SEQ ID NO: 2283

SEQ ID NO: 3690 - DNA, 41 bp, Homo sapiens; identical to SEQ ID NO: 2284

SEQ ID NO: 3691 - DNA, 41 bp, Homo sapiens; identical to SEQ ID NO: 2285

SEQ ID NO: 3692 - DNA, 41 bp, Homo sapiens; identical to SEQ ID NO: 2286

SEQ ID NO: 3693 - DNA, 41 bp, Homo sapiens; identical to SEQ ID NO: 2287

SEQ ID NO: 3694 - DNA, 41 bp, Homo sapiens; identical to SEQ ID NO: 2288

SEQ ID NO: 3695 - DNA, 41 bp, Homo sapiens; identical to SEQ ID NO: 2289

SEQ ID NO: 3696 - DNA, 41 bp, Homo sapiens; identical to SEQ ID NO: 2290

SEQ ID NO: 3697 - DNA, 41 bp, Homo sapiens; identical to SEQ ID NO: 2291

SEQ ID NO: 3698 - DNA, 41 bp, Homo sapiens
gttgcccaggctggactgcartggygagatcttggctcact

SEQ ID NO: 3699 - DNA, 41 bp, Homo sapiens
cccaggctggactgcartggygagatcttggctcactgcaa

SEQ ID NO: 3700 - DNA, 41 bp, Homo sapiens; identical to SEQ ID NO: 2294

SEQ ID NO: 3701 - DNA, 41 bp, Homo sapiens; identical to SEQ ID NO: 2295

SEQ ID NO: 3702 - DNA, 41 bp, Homo sapiens; identical to SEQ ID NO: 2296

SEQ ID NO: 3703 - DNA, 41 bp, Homo sapiens; identical to SEQ ID NO: 2297

SEQ ID NO: 3704 - DNA, 41 bp, Homo sapiens; identical to SEQ ID NO: 2298

SEQ ID NO: 3705 - DNA, 41 bp, Homo sapiens; identical to SEQ ID NO: 2299

SEQ ID NO: 3706 - DNA, 41 bp, Homo sapiens; identical to SEQ ID NO: 2300

SEQ ID NO: 3707 - DNA, 41 bp, Homo sapiens; identical to SEQ ID NO: 2301

SEQ ID NO: 3708 - DNA, 41 bp, Homo sapiens; identical to SEQ ID NO: 2302

SEQ ID NO: 3709 - DNA, 41 bp, Homo sapiens; identical to SEQ ID NO: 2303

SEQ ID NO: 3710 - DNA, 41 bp, Homo sapiens; identical to SEQ ID NO: 2304

SEQ ID NO: 3711 - DNA, 41 bp, Homo sapiens; identical to SEQ ID NO: 2305

SEQ ID NO: 3712 - DNA, 41 bp, Homo sapiens; identical to SEQ ID NO: 2306

SEQ ID NO: 3713 - DNA, 41 bp, Homo sapiens; identical to SEQ ID NO: 2307

SEQ ID NO: 3714 - DNA, 41 bp, Homo sapiens; identical to SEQ ID NO: 2308

SEQ ID NO: 3715 - DNA, 41 bp, Homo sapiens; identical to SEQ ID NO: 2309

SEQ ID NO: 3716 - DNA, 41 bp, Homo sapiens; identical to SEQ ID NO: 2310

SEQ ID NO: 3717 - DNA, 41 bp, Homo sapiens; identical to SEQ ID NO: 2311

SEQ ID NO: 3718 - DNA, 41 bp, Homo sapiens; identical to SEQ ID NO: 2312

SEQ ID NO: 3719 - DNA, 41 bp, Homo sapiens; identical to SEQ ID NO: 2313

SEQ ID NO: 3720 - DNA, 41 bp, Homo sapiens; identical to SEQ ID NO: 2314

SEQ ID NO: 3721 - DNA, 41 bp, Homo sapiens; identical to SEQ ID NO: 2315

SEQ ID NO: 3722 - DNA, 41 bp, Homo sapiens; identical to SEQ ID NO: 2316

SEQ ID NO: 3723 - DNA, 41 bp, Homo sapiens; identical to SEQ ID NO: 2318

SEQ ID NO: 3724 - DNA, 41 bp, Homo sapiens; identical to SEQ ID NO: 2319

SEQ ID NO: 3725 - DNA, 41 bp, Homo sapiens; identical to SEQ ID NO: 2320

SEQ ID NO: 3726 - DNA, 41 bp, Homo sapiens; identical to SEQ ID NO: 2321

SEQ ID NO: 3727 - DNA, 41 bp, Homo sapiens; identical to SEQ ID NO: 2322

SEQ ID NO: 3728 - DNA, 41 bp, Homo sapiens; identical to SEQ ID NO: 2323

SEQ ID NO: 3729 - DNA, 41 bp, Homo sapiens; identical to SEQ ID NO: 2324

SEQ ID NO: 3730 - DNA, 41 bp, Homo sapiens; identical to SEQ ID NO: 2325

SEQ ID NO: 3731 - DNA, 41 bp, Homo sapiens; identical to SEQ ID NO: 2326

SEQ ID NO: 3732 - DNA, 41 bp, Homo sapiens; identical to SEQ ID NO: 2327

SEQ ID NO: 3733 - DNA, 41 bp, Homo sapiens
cacactatggccctgccccayacycatsccrgctccaccca

SEQ ID NO: 3734 - DNA, 41 bp, Homo sapiens
actatggccctgccccayacycatsccrgctccacccacac

SEQ ID NO: 3735 - DNA, 41 bp, Homo sapiens
tggccctgccccayacycatsccrgctccacccacaccatg

SEQ ID NO: 3736 - DNA, 41 bp, Homo sapiens
ccctgccccayacycatsccrgctccacccacaccatggcc

SEQ ID NO: 3737 - DNA, 41 bp, Homo sapiens; identical to SEQ ID NO: 2332

SEQ ID NO: 3738 - DNA, 41 bp, Homo sapiens; identical to SEQ ID NO: 2333

SEQ ID NO: 3739 - DNA, 41 bp, Homo sapiens; identical to SEQ ID NO: 2334

SEQ ID NO: 3740 - DNA, 41 bp, Homo sapiens; identical to SEQ ID NO: 2335

SEQ ID NO: 3741 - DNA, 41 bp, Homo sapiens; identical to SEQ ID NO: 2336

SEQ ID NO: 3742 - DNA, 41 bp, Homo sapiens; identical to SEQ ID NO: 2337

SEQ ID NO: 3743 - DNA, 41 bp, Homo sapiens; identical to SEQ ID NO: 2339

SEQ ID NO: 3744 - DNA, 41 bp, Homo sapiens; identical to SEQ ID NO: 2340

SEQ ID NO: 3745 - DNA, 41 bp, Homo sapiens; identical to SEQ ID NO: 2341

SEQ ID NO: 3746 - DNA, 41 bp, Homo sapiens; identical to SEQ ID NO: 2343

SEQ ID NO: 3747 - DNA, 41 bp, Homo sapiens; identical to SEQ ID NO: 2344

SEQ ID NO: 3748 - DNA, 41 bp, Homo sapiens
cagcagggagacttggggagrrgggagagagttcacactgc

SEQ ID NO: 3749 - DNA, 41 bp, Homo sapiens
agcagggagacttggggagrrgggagagagttcacactgcg

SEQ ID NO: 3750 - DNA, 41 bp, Homo sapiens; identical to SEQ ID NO: 2347

SEQ ID NO: 3751 - DNA, 66 bp, Homo sapiens; identical to SEQ ID NO: 2348
  misc_feature (43)..(46): t is present or absent.

SEQ ID NO: 3752 - DNA, 50 bp, Homo sapiens; identical to SEQ ID NO: 2349
  misc_feature (29)..(30): g is present or absent.

SEQ ID NO: 3753 - DNA, 47 bp, Homo sapiens; identical to SEQ ID NO: 2350
  misc_feature (27)..(27): c is present or absent.

SEQ ID NO: 3754 - DNA, 54 bp, Homo sapiens; identical to SEQ ID NO: 2351
  misc_feature (33)..(34): a is present or absent.

SEQ ID NO: 3755 - DNA, 41 bp, Homo sapiens
ctggtaattaatattagatarataaaaacattgagttagaa

SEQ ID NO: 3756 - DNA, 41 bp, Homo sapiens
aacattatgttgttttaaacrtaactgagtgtagaaataag

SEQ ID NO: 3757 - DNA, 41 bp, Homo sapiens
ttgccatatgtataataaagwattcatgtttttgctagcct

SEQ ID NO: 3758 - DNA, 41 bp, Homo sapiens
agactggagtttgcatgctayctaagactgtagctgattcc

SEQ ID NO: 3759 - DNA, 41 bp, Homo sapiens
gaggagatcatcctcttggcyaatgtctattaacttcgcca

SEQ ID NO: 3760 - DNA, 41 bp, Homo sapiens
cagaaacttttgccctctctrtaggctagctcactgtgaaa

SEQ ID NO: 3761 - DNA, 41 bp, Homo sapiens
agctctcttaaaagtatccaygctgaattttctgcacctta

SEQ ID NO: 3762 - DNA, 39 bp, Homo sapiens
tcgttaacagcaatgataatytagcccatccttatccya

SEQ ID NO: 3763 - DNA, 39 bp, Homo sapiens
tytagcccatccttatccyagaaacaacaggctcataag

SEQ ID NO: 3764 - DNA, 41 bp, Homo sapiens
tccatgtgttacaaactgccytggagaacagaaaaagagaa

SEQ ID NO: 3765 - DNA, 41 bp, Homo sapiens
cataatatatatacatatgcrcacacacacacatatacaca

SEQ ID NO: 3766 - DNA, 41 bp, Homo sapiens
agtagttcatgttggaacaayatgcttgagaaatgcagaaa

SEQ ID NO: 3767 - DNA, 41 bp, Homo sapiens
ttgataacaggcacagggcaycacaaataaatgatggaaca

SEQ ID NO: 3768 - DNA, 41 bp, Homo sapiens
cattggagtattaggctacgyttttttgttgtttgcaggat

SEQ ID NO: 3769 - DNA, 41 bp, Homo sapiens
ttgtttgcaggatatttcttyttcttaagaacttcatatta

SEQ ID NO: 3770 - DNA, 41 bp, Homo sapiens
caattagttttcttcaaaaargtagaaaagttggaattgta

SEQ ID NO: 3771 - DNA, 41 bp, Homo sapiens
catataaaaaatcttgattawactttggtatattttaaaaa

SEQ ID NO: 3772 - DNA, 41 bp, Homo sapiens
gcaatgccttggaactatctyttaaaacacattgactttca

SEQ ID NO: 3773 - DNA, 41 bp, Homo sapiens
ttgtgttcgatagatcagtarggtgactagttaacaatgat

SEQ ID NO: 3774 - DNA, 41 bp, Homo sapiens
aaagggaaatctgtggtgatygccctgtcattcattcatag

SEQ ID NO: 3775 - DNA, 41 bp, Homo sapiens
ttcctttctttgtcaacttcygtccaaattccactcaagct

SEQ ID NO: 3776 - DNA, 41 bp, Homo sapiens
tattctatattctgtactctrttaatattctataataataa

SEQ ID NO: 3777 - DNA, 41 bp, Homo sapiens
atttaaatatctatctctctrtatttaccatttcaaattta

SEQ ID NO: 3778 - DNA, 41 bp, Homo sapiens
gaggttagtatgccaaattaragcatcactatctgtcataa

SEQ ID NO: 3779 - DNA, 41 bp, Homo sapiens
ttccattggcctattatgccygtgttatatccagtgttaga

SEQ ID NO: 3780 - DNA, 41 bp, Homo sapiens
aagagaccaacaaaattcttsatcagcagaaaagcacagga

SEQ ID NO: 3781 - DNA, 41 bp, Homo sapiens
gcttactgaatatataaattsagaaaagccatgccaagcaa

SEQ ID NO: 3782 - DNA, 41 bp, Homo sapiens
tgagagtggtgagtaactcaraatgcctggactccraggtc

SEQ ID NO: 3783 - DNA, 41 bp, Homo sapiens
actcaraatgcctggactccraggtcccagcaggtcaatga

SEQ ID NO: 3784 - DNA, 41 bp, Homo sapiens
atgggtcttcgggattcagcrttctggtgagtcaaacgcag

SEQ ID NO: 3785 - DNA, 41 bp, Homo sapiens
cctcccaagtagctgggactrcaggtgccgrccaccatgcc

SEQ ID NO: 3786 - DNA, 41 bp, Homo sapiens
agctgggactrcaggtgccgrccaccatgcctggataattt

SEQ ID NO: 3787 - DNA, 41 bp, Homo sapiens
gtgagttattattgtgttggytttgcagctgttttgttttt

SEQ ID NO: 3788 - DNA, 41 bp, Homo sapiens
atttcattatagttttcaaakaatattgtaaaacaaaagaa

SEQ ID NO: 3789 - DNA, 41 bp, Homo sapiens
tattcctaattctaaagaatyctgcccaaaacttttacctt

SEQ ID NO: 3790 - DNA, 41 bp, Homo sapiens
tggatgaataagtgaatgaaragttatcttagartccattt

SEQ ID NO: 3791 - DNA, 41 bp, Homo sapiens
gaatgaaragttatcttagartccatttcaggtcttccttt

SEQ ID NO: 3792 - DNA, 41 bp, Homo sapiens
agtgaattaaatatctttccrtccacctatagcctaaaaat

SEQ ID NO: 3793 - DNA, 41 bp, Homo sapiens
taaagaaatctttcctcaccrgcctggtcgtgttcctcctc

SEQ ID NO: 3794 - DNA, 41 bp, Homo sapiens
tggaatccataggctgtaatyatttacaaactcagcattgt

SEQ ID NO: 3795 - DNA, 41 bp, Homo sapiens
acacatacttaaatatatttyctctgttctacttttgtttt

SEQ ID NO: 3796 - DNA, 41 bp, Homo sapiens
agaggaaaattatggtttggraatgaaataaagcagaaata

SEQ ID NO: 3797 - DNA, 41 bp, Homo sapiens
tggccaaagatctttccaacytgtgccagtggttcacagga

SEQ ID NO: 3798 - DNA, 41 bp, Homo sapiens
ctgaagaaaattgtcactttraagtatcttttctttttttc

SEQ ID NO: 3799 - DNA, 41 bp, Homo sapiens
aaaaaaaaaaaaaaagagagrgagaaagaaaatatttgtta

SEQ ID NO: 3800 - DNA, 41 bp, Homo sapiens
tataaaagttagaaaaaaatkartatgttttagaaatagat

SEQ ID NO: 3801 - DNA, 41 bp, Homo sapiens
taaaagttagaaaaaaatkartatgttttagaaatagatgt

SEQ ID NO: 3802 - DNA, 41 bp, Homo sapiens
ctcaaaggagttttagccatrtaataacttactattaatct

SEQ ID NO: 3803 - DNA, 41 bp, Homo sapiens
ggttcagtcaccatctataayaataagctttcagaaatggc

SEQ ID NO: 3804 - DNA, 41 bp, Homo sapiens
cttattgcaaaataagtgaarttgagtttctaagagatcaa

SEQ ID NO: 3805 - DNA, 41 bp, Homo sapiens
ttttgtttttgagacggagtmtcgatcatctcggctcactg

SEQ ID NO: 3806 - DNA, 41 bp, Homo sapiens
acatatacattcattcaaatrcacattttatggtgacaaca

SEQ ID NO: 3807 - DNA, 41 bp, Homo sapiens
gaatcatcaggaaagtgttaygcaaattctgattagtactt

SEQ ID NO: 3808 - DNA, 41 bp, Homo sapiens
atttaaagaaaatttgtagaygttttaggtggaatgaagaa

SEQ ID NO: 3809 - DNA, 41 bp, Homo sapiens
tgtcaggtttttctttttttwttctttatgttagaaattgg

SEQ ID NO: 3810 - DNA, 41 bp, Homo sapiens
gctgtaaactcgttttgtgamttaggtaccccatgattcta

SEQ ID NO: 3811 - DNA, 41 bp, Homo sapiens
cacgttatacctatagtaacrcggaagastctaatcatgag

SEQ ID NO: 3812 - DNA, 41 bp, Homo sapiens
acctatagtaacrcggaagastctaatcatgagatscttag

SEQ ID NO: 3813 - DNA, 41 bp, Homo sapiens
gaagastctaatcatgagatscttagcagagccaatctcta

SEQ ID NO: 3814 - DNA, 41 bp, Homo sapiens
gaagaagcacaggagagaggyagaatcttgacatccaaagg

SEQ ID NO: 3815 - DNA, 41 bp, Homo sapiens
aaaatctattttgaaagacayttggaactaaaaaaatcttt

SEQ ID NO: 3816 - DNA, 41 bp, Homo sapiens
ttgtttaaagtaaaataaaaysaacaaaacatttttcaaag

SEQ ID NO: 3817 - DNA, 41 bp, Homo sapiens
tgtttaaagtaaaataaaaysaacaaaacatttttcaaaga

SEQ ID NO: 3818 - DNA, 41 bp, Homo sapiens
actgtggtggggtggggggakgggggagggatagcattggg

SEQ ID NO: 3819 - DNA, 41 bp, Homo sapiens
cctgcacaatgtgcacatgtrccctaaaacctaaagtataa

SEQ ID NO: 3820 - DNA, 41 bp, Homo sapiens
cccagccrgagtgcagtggcrggatcatagctcactgtaac

SEQ ID NO: 3821 - DNA, 41 bp, Homo sapiens
ctcctagatatagacaaaaamcaaggtgcacaatggccatg

SEQ ID NO: 3822 - DNA, 41 bp, Homo sapiens
cctgattaatatatgggaagraagggtaaggggtagtggga

SEQ ID NO: 3823 - DNA, 41 bp, Homo sapiens
aataattttcagttctgtacrcactgtgaaacttcttttat

SEQ ID NO: 3824 - DNA, 41 bp, Homo sapiens
gtgtctcccaaaccacatcaktttcatcttttgctattaca

SEQ ID NO: 3825 - DNA, 41 bp, Homo sapiens
cctggatattatcagacttaraatggagaggaaaagtcaat

SEQ ID NO: 3826 - DNA, 41 bp, Homo sapiens
caaaaattagatacaaggggstgaaattgactttaattgta

SEQ ID NO: 3827 - DNA, 41 bp, Homo sapiens
ctctaaatgctgacccaggtsacactgggtagatttacaac

SEQ ID NO: 3828 - DNA, 41 bp, Homo sapiens
cttctcactaggttgtgagaygctgttgttaaattttatgt

SEQ ID NO: 3829 - DNA, 41 bp, Homo sapiens
taacagcatcatcctgwtgtrtttattttcatagacagaaa

SEQ ID NO: 3830 - DNA, 41 bp, Homo sapiens
tttgcatgtatgttggtaaarcctaagtcaaaactcagtta

SEQ ID NO: 3831 - DNA, 41 bp, Homo sapiens
atattattttactgtcttagsctgtatattaagaaactgac

SEQ ID NO: 3832 - DNA, 41 bp, Homo sapiens
gcggtggacatagaaagcccrgaagcttcttgatgtgctta

SEQ ID NO: 3833 - DNA, 42 bp, Homo sapiens
  misc_feature (21)..(22): tt is present or absent.
ttttgcttttgtgtgtgagtttgtttcagaggttttgtcttt

SEQ ID NO: 3834 - DNA, 51 bp, Homo sapiens
  misc_feature (30)..(31): a is present or absent.
taaagtataataataaaacgaaaaaaaaaaagaaattcctcctgtacagag

SEQ ID NO: 3835 - DNA, 52 bp, Homo sapiens
  misc_feature (31)..(32): a is present or absent.
ctcctgcaaataggtatgacaaaaaaaaaaaatcaactgagtacaaaaagct

SEQ ID NO: 3836 - DNA, 41 bp, Homo sapiens
  misc_feature (21)..(21): t is present or absent.
gtactagagtgcactccttttgcaacaggacggccaaagga

SEQ ID NO: 3837 - DNA, 41 bp, Homo sapiens
  misc_feature (21)..(21): t is present or absent.
tcaatgcatcttttttttttngaaatggagtctcgctctgt

SEQ ID NO: 3838 - DNA, 41 bp, Homo sapiens
  misc_feature (21)..(21): t is present or absent.
gtatatggtatttttttttttagacctcttagaaagctagt

SEQ ID NO: 3839 - DNA, 41 bp, Homo sapiens
  misc_feature (21)..(21): a is present or absent.
attttttttaaaggtatccaatagtcattctcaatttcttc

SEQ ID NO: 3840 - DNA, 41 bp, Homo sapiens
  misc_feature (21)..(21): t is present or absent.
ggatattctgggtttttttttctacaaactcaagttttttg

SEQ ID NO: 3841 - DNA, 41 bp, Homo sapiens
  misc_feature (21)..(21): t is present or absent.
gtggaataatttttgacttatgcatttggtcaaataaaatt

SEQ ID NO: 3842 - DNA, 55 bp, Homo sapiens
  misc_feature (32)..(35): t is present or absent.
tatgtcgagtaacatatgtctttttttttttttttctgaatgccagcttgcagtt

SEQ ID NO: 3843 - DNA, 43 bp, Homo sapiens
  misc_feature (21)..(23): cat is present or absent.
tgaataatagtcatcatcatcataattattatcattacaacta

SEQ ID NO: 3844 - DNA, 41 bp, Homo sapiens
  misc_feature (21)..(21): t is present or absent.
tcaggtttttctttttttwttctttatgttagaaattggac

SEQ ID NO: 3845 - DNA, 41 bp, Homo sapiens
  misc_feature (21)..(21): a is present or absent.
actccatctcaaaaaaaaaaagagagaaaaaaattctgcat

SEQ ID NO: 3846 - DNA, 41 bp, Homo sapiens
  misc_feature (21)..(21): a is present or absent.
caatactttgcaaaaaaaaaagatctttccctgatgatatt

SEQ ID NO: 3847 - DNA, 41 bp, Homo sapiens
  misc_feature (21)..(21): t is present or absent.
atactgaatggttttttttttctcctttctcatatgacctc

SEQ ID NO: 3848 - DNA, 41 bp, Homo sapiens
  misc_feature (21)..(21): a is present or absent.
atccttggaccaaaaaaaaaactttatctgtgctttgcgtg

SEQ ID NO: 3849 - DNA, 41 bp, Homo sapiens; identical to SEQ ID NO: 1381

SEQ ID NO: 3850 - DNA, 41 bp, Homo sapiens; identical to SEQ ID NO: 1382

SEQ ID NO: 3851 - DNA, 41 bp, Homo sapiens; identical to SEQ ID NO: 1383

SEQ ID NO: 3852 - DNA, 41 bp, Homo sapiens; identical to SEQ ID NO: 1384

SEQ ID NO: 3853 - DNA, 41 bp, Homo sapiens; identical to SEQ ID NO: 1385

SEQ ID NO: 3854 - DNA, 41 bp, Homo sapiens; identical to SEQ ID NO: 1386

SEQ ID NO: 3855 - DNA, 41 bp, Homo sapiens; identical to SEQ ID NO: 1387

SEQ ID NO: 3856 - DNA, 41 bp, Homo sapiens; identical to SEQ ID NO: 1388

SEQ ID NO: 3857 - DNA, 41 bp, Homo sapiens; identical to SEQ ID NO: 1389
  misc_feature (21)..(21): g is present or absent.

SEQ ID NO: 3858 - DNA, 41 bp, Homo sapiens; identical to SEQ ID NO: 1390

SEQ ID NO: 3859 - DNA, 41 bp, Homo sapiens; identical to SEQ ID NO: 1391

SEQ ID NO: 3860 - DNA, 41 bp, Homo sapiens; identical to SEQ ID NO: 1392

SEQ ID NO: 3861 - DNA, 41 bp, Homo sapiens; identical to SEQ ID NO: 1393

SEQ ID NO: 3862 - DNA, 41 bp, Homo sapiens; identical to SEQ ID NO: 1394

SEQ ID NO: 3863 - DNA, 41 bp, Homo sapiens; identical to SEQ ID NO: 1395

SEQ ID NO: 3864 - DNA, 41 bp, Homo sapiens; identical to SEQ ID NO: 1396

SEQ ID NO: 3865 - DNA, 41 bp, Homo sapiens; identical to SEQ ID NO: 1397

SEQ ID NO: 3866 - DNA, 41 bp, Homo sapiens; identical to SEQ ID NO: 1398

SEQ ID NO: 3867 - DNA, 41 bp, Homo sapiens; identical to SEQ ID NO: 1399

SEQ ID NO: 3868 - DNA, 41 bp, Homo sapiens; identical to SEQ ID NO: 1400

SEQ ID NO: 3869 - DNA, 41 bp, Homo sapiens; identical to SEQ ID NO: 1401

SEQ ID NO: 3870 - DNA, 41 bp, Homo sapiens; identical to SEQ ID NO: 1402

SEQ ID NO: 3871 - DNA, 41 bp, Homo sapiens; identical to SEQ ID NO: 1403

SEQ ID NO: 3872 - DNA, 41 bp, Homo sapiens; identical to SEQ ID NO: 1404

SEQ ID NO: 3873 - DNA, 41 bp, Homo sapiens; identical to SEQ ID NO: 1405

SEQ ID NO: 3874 - DNA, 41 bp, Homo sapiens; identical to SEQ ID NO: 1406

SEQ ID NO: 3875 - DNA, 41 bp, Homo sapiens; identical to SEQ ID NO: 1407

SEQ ID NO: 3876 - DNA, 41 bp, Homo sapiens; identical to SEQ ID NO: 1408

SEQ ID NO: 3877 - DNA, 41 bp, Homo sapiens; identical to SEQ ID NO: 1409

SEQ ID NO: 3878 - DNA, 41 bp, Homo sapiens; identical to SEQ ID NO: 1410

SEQ ID NO: 3879 - DNA, 41 bp, Homo sapiens; identical to SEQ ID NO: 1411
  misc_feature (21)..(21): a is present or absent.

SEQ ID NO: 3880 - DNA, 41 bp, Homo sapiens; identical to SEQ ID NO: 1412

SEQ ID NO: 3881 - DNA, 41 bp, Homo sapiens; identical to SEQ ID NO: 1413

SEQ ID NO: 3882 - DNA, 41 bp, Homo sapiens; identical to SEQ ID NO: 1414

SEQ ID NO: 3883 - DNA, 41 bp, Homo sapiens; identical to SEQ ID NO: 1415

SEQ ID NO: 3884 - DNA, 41 bp, Homo sapiens; identical to SEQ ID NO: 1416

SEQ ID NO: 3885 - DNA, 44 bp, Homo sapiens; identical to SEQ ID NO: 1417
  misc_feature (21)..(24): aaag is present or absent.

SEQ ID NO: 3886 - DNA, 40 bp, Homo sapiens; identical to SEQ ID NO: 1418

SEQ ID NO: 3887 - DNA, 41 bp, Homo sapiens; identical to SEQ ID NO: 1419

SEQ ID NO: 3888 - DNA, 41 bp, Homo sapiens; identical to SEQ ID NO: 1420

SEQ ID NO: 3889 - DNA, 41 bp, Homo sapiens; identical to SEQ ID NO: 14

SEQ ID NO: 3890 - DNA, 41 bp, Homo sapiens; identical to SEQ ID NO: 15

SEQ ID NO: 3891 - DNA, 41 bp, Homo sapiens; identical to SEQ ID NO: 16

SEQ ID NO: 3892 - DNA, 41 bp, Homo sapiens; identical to SEQ ID NO: 17

SEQ ID NO: 3893 - DNA, 41 bp, Homo sapiens; identical to SEQ ID NO: 18

SEQ ID NO: 3894 - DNA, 41 bp, Homo sapiens; identical to SEQ ID NO: 19

SEQ ID NO: 3895 - DNA, 41 bp, Homo sapiens; identical to SEQ ID NO: 20

SEQ ID NO: 3896 - DNA, 41 bp, Homo sapiens; identical to SEQ ID NO: 21

SEQ ID NO: 3897 - DNA, 41 bp, Homo sapiens; identical to SEQ ID NO: 22

SEQ ID NO: 3898 - DNA, 41 bp, Homo sapiens; identical to SEQ ID NO: 23

SEQ ID NO: 3899 - DNA, 41 bp, Homo sapiens; identical to SEQ ID NO: 24

SEQ ID NO: 3900 - DNA, 41 bp, Homo sapiens; identical to SEQ ID NO: 25

SEQ ID NO: 3901 - DNA, 41 bp, Homo sapiens; identical to SEQ ID NO: 26

SEQ ID NO: 3902 - DNA, 41 bp, Homo sapiens; identical to SEQ ID NO: 27

SEQ ID NO: 3903 - DNA, 41 bp, Homo sapiens; identical to SEQ ID NO: 28

SEQ ID NO: 3904 - DNA, 41 bp, Homo sapiens; identical to SEQ ID NO: 29

SEQ ID NO: 3905 - DNA, 41 bp, Homo sapiens; identical to SEQ ID NO: 30

SEQ ID NO: 3906 - DNA, 41 bp, Homo sapiens; identical to SEQ ID NO: 31

SEQ ID NO: 3907 - DNA, 41 bp, Homo sapiens; identical to SEQ ID NO: 32

SEQ ID NO: 3908 - DNA, 41 bp, Homo sapiens
gcactttgggaggccaaggtrcataaatcacttgaggtcag

SEQ ID NO: 3909 - DNA, 41 bp, Homo sapiens; identical to SEQ ID NO: 33

SEQ ID NO: 3910 - DNA, 41 bp, Homo sapiens; identical to SEQ ID NO: 34

SEQ ID NO: 3911 - DNA, 41 bp, Homo sapiens; identical to SEQ ID NO: 35

SEQ ID NO: 3912 - DNA, 41 bp, Homo sapiens; identical to SEQ ID NO: 36

SEQ ID NO: 3913 - DNA, 41 bp, Homo sapiens; identical to SEQ ID NO: 37

SEQ ID NO: 3914 - DNA, 41 bp, Homo sapiens; identical to SEQ ID NO: 38

SEQ ID NO: 3915 - DNA, 41 bp, Homo sapiens; identical to SEQ ID NO: 39
  misc_feature (21)..(21): t is present or absent.

SEQ ID NO: 3916 - DNA, 40 bp, Homo sapiens; identical to SEQ ID NO: 40

SEQ ID NO: 3917 - DNA, 41 bp, Homo sapiens; identical to SEQ ID NO: 41

SEQ ID NO: 3918 - DNA, 41 bp, Homo sapiens; identical to SEQ ID NO: 2072
  misc_feature (21)..(21): a is present or absent.

SEQ ID NO: 3919 - DNA, 41 bp, Homo sapiens; identical to SEQ ID NO: 42

SEQ ID NO: 3920 - DNA, 41 bp, Homo sapiens; identical to SEQ ID NO: 43

SEQ ID NO: 3921 - DNA, 41 bp, Homo sapiens; identical to SEQ ID NO: 44

SEQ ID NO: 3922 - DNA, 41 bp, Homo sapiens; identical to SEQ ID NO: 45

SEQ ID NO: 3923 - DNA, 41 bp, Homo sapiens; identical to SEQ ID NO: 46

SEQ ID NO: 3924 - DNA, 41 bp, Homo sapiens; identical to SEQ ID NO: 1427

SEQ ID NO: 3925 - DNA, 41 bp, Homo sapiens; identical to SEQ ID NO: 1428

SEQ ID NO: 3926 - DNA, 42 bp, Homo sapiens; identical to SEQ ID NO: 1429
  misc_feature (21)..(22): at is present or absent.

SEQ ID NO: 3927 - DNA, 41 bp, Homo sapiens; identical to SEQ ID NO: 1430

SEQ ID NO: 3928 - DNA, 41 bp, Homo sapiens; identical to SEQ ID NO: 1431

SEQ ID NO: 3929 - DNA, 41 bp, Homo sapiens; identical to SEQ ID NO: 1432

SEQ ID NO: 3930 - DNA, 41 bp, Homo sapiens; identical to SEQ ID NO: 1433

SEQ ID NO: 3931 - DNA, 41 bp, Homo sapiens; identical to SEQ ID NO: 1434

SEQ ID NO: 3932 - DNA, 41 bp, Homo sapiens; identical to SEQ ID NO: 1435

SEQ ID NO: 3933 - DNA, 41 bp, Homo sapiens; identical to SEQ ID NO: 1436
  misc_feature (21)..(21): a is present or absent.

SEQ ID NO: 3934 - DNA, 40 bp, Homo sapiens; identical to SEQ ID NO: 1437

SEQ ID NO: 3935 - DNA, 41 bp, Homo sapiens; identical to SEQ ID NO: 1438

SEQ ID NO: 3936 - DNA, 41 bp, Homo sapiens; identical to SEQ ID NO: 1439

SEQ ID NO: 3937 - DNA, 41 bp, Homo sapiens; identical to SEQ ID NO: 1440

SEQ ID NO: 3938 - DNA, 41 bp, Homo sapiens; identical to SEQ ID NO: 1441

SEQ ID NO: 3939 - DNA, 41 bp, Homo sapiens; identical to SEQ ID NO: 1442

SEQ ID NO: 3940 - DNA, 41 bp, Homo sapiens; identical to SEQ ID NO: 1443

SEQ ID NO: 3941 - DNA, 41 bp, Homo sapiens; identical to SEQ ID NO: 1444

SEQ ID NO: 3942 - DNA, 41 bp, Homo sapiens; identical to SEQ ID NO: 1445

SEQ ID NO: 3943 - DNA, 41 bp, Homo sapiens; identical to SEQ ID NO: 1446

SEQ ID NO: 3944 - DNA, 41 bp, Homo sapiens; identical to SEQ ID NO: 1447

SEQ ID NO: 3945 - DNA, 41 bp, Homo sapiens; identical to SEQ ID NO: 1448

SEQ ID NO: 3946 - DNA, 41 bp, Homo sapiens; identical to SEQ ID NO: 1449

SEQ ID NO: 3947 - DNA, 41 bp, Homo sapiens; identical to SEQ ID NO: 1450

SEQ ID NO: 3948 - DNA, 41 bp, Homo sapiens; identical to SEQ ID NO: 1451

SEQ ID NO: 3949 - DNA, 41 bp, Homo sapiens; identical to SEQ ID NO: 1452

SEQ ID NO: 3950 - DNA, 41 bp, Homo sapiens; identical to SEQ ID NO: 1453
  misc_feature (21)..(21): c is present or absent.

SEQ ID NO: 3951 - DNA, 41 bp, Homo sapiens; identical to SEQ ID NO: 1454

SEQ ID NO: 3952 - DNA, 41 bp, Homo sapiens; identical to SEQ ID NO: 1455

SEQ ID NO: 3953 - DNA, 41 bp, Homo sapiens
  misc_feature (21)..(22): gg is present or absent.
tcctccactgccacaaggggggcttctttcctgggacaatc

SEQ ID NO: 3954 - DNA, 40 bp, Homo sapiens; identical to SEQ ID NO: 1457

SEQ ID NO: 3955 - DNA, 41 bp, Homo sapiens; identical to SEQ ID NO: 1458

SEQ ID NO: 3956 - DNA, 41 bp, Homo sapiens; identical to SEQ ID NO: 1459

SEQ ID NO: 3957 - DNA, 41 bp, Homo sapiens; identical to SEQ ID NO: 1460

SEQ ID NO: 3958 - DNA, 41 bp, Homo sapiens; identical to SEQ ID NO: 1461

SEQ ID NO: 3959 - DNA, 41 bp, Homo sapiens; identical to SEQ ID NO: 1462

SEQ ID NO: 3960 - DNA, 41 bp, Homo sapiens; identical to SEQ ID NO: 1463

SEQ ID NO: 3961 - DNA, 41 bp, Homo sapiens; identical to SEQ ID NO: 1464

SEQ ID NO: 3962 - DNA, 43 bp, Homo sapiens; identical to SEQ ID NO: 1465
  misc_feature (21)..(23): gtc is present or absent.

SEQ ID NO: 3963 - DNA, 41 bp, Homo sapiens; identical to SEQ ID NO: 1466

SEQ ID NO: 3964 - DNA, 41 bp, Homo sapiens; identical to SEQ ID NO: 1467

SEQ ID NO: 3965 - DNA, 41 bp, Homo sapiens; identical to SEQ ID NO: 1468

SEQ ID NO: 3966 - DNA, 41 bp, Homo sapiens; identical to SEQ ID NO: 1469

SEQ ID NO: 3967 - DNA, 41 bp, Homo sapiens; identical to SEQ ID NO: 1470

SEQ ID NO: 3968 - DNA, 41 bp, Homo sapiens; identical to SEQ ID NO: 1471

SEQ ID NO: 3969 - DNA, 41 bp, Homo sapiens; identical to SEQ ID NO: 1472

SEQ ID NO: 3970 - DNA, 41 bp, Homo sapiens; identical to SEQ ID NO: 1473

SEQ ID NO: 3971 - DNA, 41 bp, Homo sapiens; identical to SEQ ID NO: 1474

SEQ ID NO: 3972 - DNA, 41 bp, Homo sapiens; identical to SEQ ID NO: 1475

SEQ ID NO: 3973 - DNA, 41 bp, Homo sapiens; identical to SEQ ID NO: 1476

SEQ ID NO: 3974 - DNA, 41 bp, Homo sapiens; identical to SEQ ID NO: 1477

SEQ ID NO: 3975 - DNA, 41 bp, Homo sapiens; identical to SEQ ID NO: 1478

SEQ ID NO: 3976 - DNA, 41 bp, Homo sapiens; identical to SEQ ID NO: 1479

SEQ ID NO: 3977 - DNA, 41 bp, Homo sapiens; identical to SEQ ID NO: 1480

SEQ ID NO: 3978 - DNA, 41 bp, Homo sapiens; identical to SEQ ID NO: 1481

SEQ ID NO: 3979 - DNA, 41 bp, Homo sapiens; identical to SEQ ID NO: 1482

SEQ ID NO: 3980 - DNA, 41 bp, Homo sapiens; identical to SEQ ID NO: 1483

SEQ ID NO: 3981 - DNA, 41 bp, Homo sapiens; identical to SEQ ID NO: 1484

SEQ ID NO: 3982 - DNA, 41 bp, Homo sapiens; identical to SEQ ID NO: 1485

SEQ ID NO: 3983 - DNA, 41 bp, Homo sapiens; identical to SEQ ID NO: 1486

SEQ ID NO: 3984 - DNA, 41 bp, Homo sapiens; identical to SEQ ID NO: 1487
  misc_feature (21)..(21): t is present or absent.

SEQ ID NO: 3985 - DNA, 41 bp, Homo sapiens; identical to SEQ ID NO: 1488

SEQ ID NO: 3986 - DNA, 41 bp, Homo sapiens; identical to SEQ ID NO: 1489

SEQ ID NO: 3987 - DNA, 41 bp, Homo sapiens; identical to SEQ ID NO: 1490

SEQ ID NO: 3988 - DNA, 41 bp, Homo sapiens; identical to SEQ ID NO: 1491

SEQ ID NO: 3989 - DNA, 41 bp, Homo sapiens; identical to SEQ ID NO: 1492

SEQ ID NO: 3990 - DNA, 41 bp, Homo sapiens; identical to SEQ ID NO: 1493

SEQ ID NO: 3991 - DNA, 42 bp, Homo sapiens; identical to SEQ ID NO: 1494
  misc_feature (21)..(22): tt is present or absent.

SEQ ID NO: 3992 - DNA, 40 bp, Homo sapiens; identical to SEQ ID NO: 1495

SEQ ID NO: 3993 - DNA, 41 bp, Homo sapiens; identical to SEQ ID NO: 1496

SEQ ID NO: 3994 - DNA, 52 bp, Homo sapiens; identical to SEQ ID NO: 1497
  misc_feature (30)..(32): t is present or absent.

SEQ ID NO: 3995 - DNA, 41 bp, Homo sapiens; identical to SEQ ID NO: 1498

SEQ ID NO: 3996 - DNA, 41 bp, Homo sapiens; identical to SEQ ID NO: 1499
  misc_feature (21)..(21): a is present or absent.

SEQ ID NO: 3997 - DNA, 41 bp, Homo sapiens; identical to SEQ ID NO: 1500

SEQ ID NO: 3998 - DNA, 53 bp, Homo sapiens; identical to SEQ ID NO: 1501
  misc_feature (31)..(33): a is present or absent.

SEQ ID NO: 3999 - DNA, 41 bp, Homo sapiens; identical to SEQ ID NO: 1502

SEQ ID NO: 4000 - DNA, 41 bp, Homo sapiens; identical to SEQ ID NO: 1503

SEQ ID NO: 4001 - DNA, 42 bp, Homo sapiens; identical to SEQ ID NO: 1504
  misc_feature (21)..(22): ct is present or absent.

SEQ ID NO: 4002 - DNA, 41 bp, Homo sapiens; identical to SEQ ID NO: 1505

SEQ ID NO: 4003 - DNA, 41 bp, Homo sapiens; identical to SEQ ID NO: 1506

SEQ ID NO: 4004 - DNA, 69 bp, Homo sapiens; identical to SEQ ID NO: 1507
  misc_feature (21)..(49): cagatcttct tcagctaatt tagaaatgt is present or absent.

SEQ ID NO: 4005 - DNA, 40 bp, Homo sapiens; identical to SEQ ID NO: 1508

SEQ ID NO: 4006 - DNA, 41 bp, Homo sapiens; identical to SEQ ID NO: 1509

SEQ ID NO: 4007 - DNA, 41 bp, Homo sapiens; identical to SEQ ID NO: 1510

SEQ ID NO: 4008 - DNA, 41 bp, Homo sapiens; identical to SEQ ID NO: 1511

SEQ ID NO: 4009 - DNA, 41 bp, Homo sapiens; identical to SEQ ID NO: 1512

SEQ ID NO: 4010 - DNA, 41 bp, Homo sapiens; identical to SEQ ID NO: 1513

SEQ ID NO: 4011 - DNA, 41 bp, Homo sapiens; identical to SEQ ID NO: 1514

SEQ ID NO: 4012 - DNA, 41 bp, Homo sapiens; identical to SEQ ID NO: 1515

SEQ ID NO: 4013 - DNA, 41 bp, Homo sapiens; identical to SEQ ID NO: 1516

SEQ ID NO: 4014 - DNA, 41 bp, Homo sapiens; identical to SEQ ID NO: 1517

SEQ ID NO: 4015 - DNA, 41 bp, Homo sapiens; identical to SEQ ID NO: 1518

SEQ ID NO: 4016 - DNA, 41 bp, Homo sapiens; identical to SEQ ID NO: 1519

SEQ ID NO: 4017 - DNA, 41 bp, Homo sapiens; identical to SEQ ID NO: 1520

SEQ ID NO: 4018 - DNA, 41 bp, Homo sapiens; identical to SEQ ID NO: 1521

SEQ ID NO: 4019 - DNA, 41 bp, Homo sapiens; identical to SEQ ID NO: 1522

SEQ ID NO: 4020 - DNA, 41 bp, Homo sapiens; identical to SEQ ID NO: 1523

SEQ ID NO: 4021 - DNA, 41 bp, Homo sapiens; identical to SEQ ID NO: 1524

SEQ ID NO: 4022 - DNA, 41 bp, Homo sapiens; identical to SEQ ID NO: 1525

SEQ ID NO: 4023 - DNA, 41 bp, Homo sapiens; identical to SEQ ID NO: 1526

SEQ ID NO: 4024 - DNA, 41 bp, Homo sapiens; identical to SEQ ID NO: 1527

SEQ ID NO: 4025 - DNA, 41 bp, Homo sapiens; identical to SEQ ID NO: 1528

SEQ ID NO: 4026 - DNA, 41 bp, Homo sapiens; identical to SEQ ID NO: 1529

SEQ ID NO: 4027 - DNA, 41 bp, Homo sapiens; identical to SEQ ID NO: 1530

SEQ ID NO: 4028 - DNA, 41 bp, Homo sapiens; identical to SEQ ID NO: 1531

SEQ ID NO: 4029 - DNA, 41 bp, Homo sapiens; identical to SEQ ID NO: 1532

SEQ ID NO: 4030 - DNA, 41 bp, Homo sapiens; identical to SEQ ID NO: 1533
  misc_feature (21)..(21): a is present or absent.

SEQ ID NO: 4031 - DNA, 41 bp, Homo sapiens; identical to SEQ ID NO: 1534

SEQ ID NO: 4032 - DNA, 41 bp, Homo sapiens; identical to SEQ ID NO: 1535

SEQ ID NO: 4033 - DNA, 41 bp, Homo sapiens; identical to SEQ ID NO: 1536

SEQ ID NO: 4034 - DNA, 41 bp, Homo sapiens; identical to SEQ ID NO: 1537

SEQ ID NO: 4035 - DNA, 41 bp, Homo sapiens; identical to SEQ ID NO: 1538

SEQ ID NO: 4036 - DNA, 41 bp, Homo sapiens; identical to SEQ ID NO: 1539

SEQ ID NO: 4037 - DNA, 41 bp, Homo sapiens; identical to SEQ ID NO: 1540
  misc_feature (21)..(21): c is present or absent.

SEQ ID NO: 4038 - DNA, 40 bp, Homo sapiens; identical to SEQ ID NO: 1541

SEQ ID NO: 4039 - DNA, 41 bp, Homo sapiens; identical to SEQ ID NO: 1542

SEQ ID NO: 4040 - DNA, 41 bp, Homo sapiens; identical to SEQ ID NO: 1543

SEQ ID NO: 4041 - DNA, 41 bp, Homo sapiens; identical to SEQ ID NO: 1544

SEQ ID NO: 4042 - DNA, 41 bp, Homo sapiens; identical to SEQ ID NO: 1545
  misc_feature (21)..(21): t is present or absent.

SEQ ID NO: 4043 - DNA, 40 bp, Homo sapiens; identical to SEQ ID NO: 1546

SEQ ID NO: 4044 - DNA, 41 bp, Homo sapiens; identical to SEQ ID NO: 1547

SEQ ID NO: 4045 - DNA, 41 bp, Homo sapiens; identical to SEQ ID NO: 1548

SEQ ID NO: 4046 - DNA, 41 bp, Homo sapiens; identical to SEQ ID NO: 1549

SEQ ID NO: 4047 - DNA, 41 bp, Homo sapiens; identical to SEQ ID NO: 1550

SEQ ID NO: 4048 - DNA, 41 bp, Homo sapiens; identical to SEQ ID NO: 1551

SEQ ID NO: 4049 - DNA, 52 bp, Homo sapiens; identical to SEQ ID NO: 1552
  misc_feature (30)..(32): t is present or absent.

SEQ ID NO: 4050 - DNA, 41 bp, Homo sapiens; identical to SEQ ID NO: 1553

SEQ ID NO: 4051 - DNA, 41 bp, Homo sapiens; identical to SEQ ID NO: 1554

SEQ ID NO: 4052 - DNA, 41 bp, Homo sapiens; identical to SEQ ID NO: 1555
  misc_feature (21)..(21): t is present or absent.

SEQ ID NO: 4053 - DNA, 40 bp, Homo sapiens; identical to SEQ ID NO: 1556

SEQ ID NO: 4054 - DNA, 45 bp, Homo sapiens
  misc_feature (21)..(21): n is g or a.
  misc_feature (22)..(25): n is a or absent..
ggggacttcttttaaaaaaannnnntctgtgtttagtgttcctct

SEQ ID NO: 4055 - DNA, 41 bp, Homo sapiens; identical to SEQ ID NO: 1560

SEQ ID NO: 4056 - DNA, 41 bp, Homo sapiens; identical to SEQ ID NO: 1561

SEQ ID NO: 4057 - DNA, 41 bp, Homo sapiens; identical to SEQ ID NO: 1562

SEQ ID NO: 4058 - DNA, 41 bp, Homo sapiens; identical to SEQ ID NO: 1563
  misc_feature (21)..(21): t is present or absent.

SEQ ID NO: 4059 - DNA, 41 bp, Homo sapiens; identical to SEQ ID NO: 1564

SEQ ID NO: 4060 - DNA, 41 bp, Homo sapiens; identical to SEQ ID NO: 1565

SEQ ID NO: 4061 - DNA, 41 bp, Homo sapiens; identical to SEQ ID NO: 1566

SEQ ID NO: 4062 - DNA, 41 bp, Homo sapiens; identical to SEQ ID NO: 1567

SEQ ID NO: 4063 - DNA, 41 bp, Homo sapiens; identical to SEQ ID NO: 1568

SEQ ID NO: 4064 - DNA, 41 bp, Homo sapiens; identical to SEQ ID NO: 1569

SEQ ID NO: 4065 - DNA, 41 bp, Homo sapiens; identical to SEQ ID NO: 1570

SEQ ID NO: 4066 - DNA, 41 bp, Homo sapiens; identical to SEQ ID NO: 1571

SEQ ID NO: 4067 - DNA, 41 bp, Homo sapiens; identical to SEQ ID NO: 1572
  misc_feature (21)..(21): c is present or absent.

SEQ ID NO: 4068 - DNA, 40 bp, Homo sapiens; identical to SEQ ID NO: 1573

SEQ ID NO: 4069 - DNA, 41 bp, Homo sapiens; identical to SEQ ID NO: 1574
  misc_feature (21)..(21): a is present or absent.

SEQ ID NO: 4070 - DNA, 41 bp, Homo sapiens; identical to SEQ ID NO: 1575
  misc_feature (21)..(21): c is present or absent.

SEQ ID NO: 4071 - DNA, 41 bp, Homo sapiens; identical to SEQ ID NO: 1576

SEQ ID NO: 4072 - DNA, 41 bp, Homo sapiens; identical to SEQ ID NO: 1577

SEQ ID NO: 4073 - DNA, 41 bp, Homo sapiens; identical to SEQ ID NO: 1578

SEQ ID NO: 4074 - DNA, 41 bp, Homo sapiens; identical to SEQ ID NO: 1579

SEQ ID NO: 4075 - DNA, 41 bp, Homo sapiens
cattcacccttgggggacccrggccaataaaaaaatcacag

SEQ ID NO: 4076 - DNA, 41 bp, Homo sapiens
gatgtgccctacctgaccctyggctcggggcagacttgggg

SEQ ID NO: 4077 - DNA, 41 bp, Homo sapiens
  misc_feature (21)..(21): g is present or absent.
gggcaggagtggactcaggggttcctggtccaaatgggttc

SEQ ID NO: 4078 - DNA, 41 bp, Homo sapiens
tatggaggttttctcttcctytctgtgagttttctctctga

SEQ ID NO: 4079 - DNA, 60 bp, Homo sapiens
  misc_feature (39)..(40): t is present or absent.
taaaagccaatcaaatcaacttttttttttttttttttttaaacaagccacgcatttgcc

SEQ ID NO: 4080 - DNA, 41 bp, Homo sapiens
cacctgtaatcccagcacctkgggaggccaaggcaagtgga

SEQ ID NO: 4081 - DNA, 41 bp, Homo sapiens
gtctttactaaaaatacaaamattagctaggcatggtggcg

SEQ ID NO: 4082 - DNA, 41 bp, Homo sapiens
ccactgcgctccagcctgggygacaagagtgaaactctgtc

SEQ ID NO: 4083 - DNA, 41 bp, Homo sapiens
aggtccttaaactaccctgcrctccaagaatcagtgcctgg

SEQ ID NO: 4084 - DNA, 53 bp, Homo sapiens
  misc_feature (32)..(33): a is present or absent.
agtcttttgtatgcaccactaaaaaaaaaaaaagccatttttcctgcatgacc

SEQ ID NO: 4085 - DNA, 44 bp, Homo sapiens
  misc_feature (21)..(24): gaaa is present or absent.
ttctatgtaacagtaagaaagaaaagcagctgccaattaaacaa

SEQ ID NO: 4086 - DNA, 41 bp, Homo sapiens
tgaattgtcaggttgatgttmtccttggtggcatggcgttt

SEQ ID NO: 4087 - DNA, 41 bp, Homo sapiens
tgtggattgatccaggagatsaagcaatgttgtcagtactc

SEQ ID NO: 4088 - DNA, 41 bp, Homo sapiens
agccttgcctgccagttggastcacttggggagccttaaca

SEQ ID NO: 4089 - DNA, 52 bp, Homo sapiens
accccatctctattgaaaagaaaaaaaaaaaatcaatataaaaaacatttac

SEQ ID NO: 4090 - DNA, 41 bp, Homo sapiens
tggtgatgttgagtgatgggytgatcccagggtcgccccag

SEQ ID NO: 4091 - DNA, 41 bp, Homo sapiens
tgctcattacaactattcctycttggtcaggttggcaaatt

SEQ ID NO: 4092 - DNA, 41 bp, Homo sapiens
  misc_feature (21)..(21): c is present or absent.
ctcattacaactattccttccttggtcaggttggcaaatta

SEQ ID NO: 4093 - DNA, 40 bp, Homo sapiens
ctcattacaactattccttcttggtcaggttggcaaatta

SEQ ID NO: 4094 - DNA, 41 bp, Homo sapiens
gccacctggggagggcccaarcgcgtctccagggcctgtca

SEQ ID NO: 4095 - DNA, 41 bp, Homo sapiens
aaagaaagaaaacacatttgwcttcttgacagagaactcgc

SEQ ID NO: 4096 - DNA, 41 bp, Homo sapiens
ctagcacagagggttccctgkgattgtaagttacagcagcc

SEQ ID NO: 4097 - DNA, 41 bp, Homo sapiens
ggaagttctactttcaggtgyggtgtgatccagggactctg

SEQ ID NO: 4098 - DNA, 41 bp, Homo sapiens
ctctccagagaaaacaatctktagaaggcctgcattgaaaa

SEQ ID NO: 4099 - DNA, 41 bp, Homo sapiens
aaccccaggctcaaagaagcrtgggaaataatgcatactcc

SEQ ID NO: 4100 - DNA, 41 bp, Homo sapiens
cacctctttagtgtctgtgcractgcacatttgtctcttgg

SEQ ID NO: 4101 - DNA, 41 bp, Homo sapiens
gattcagaatgattctctccragaaaacatcctttttggat

SEQ ID NO: 4102 - DNA, 42 bp, Homo sapiens
  misc_feature (21)..(22): ca is present or absent.
ccaagctaggcagtctcacacatgtgcactcacgtggccggg

SEQ ID NO: 4103 - DNA, 41 bp, Homo sapiens
gcgtgaggtctgtctctctayccttccgtccaggtgagcaa

SEQ ID NO: 4104 - DNA, 41 bp, Homo sapiens
cttggccccagataggttccscacccccgcctttctttccc

SEQ ID NO: 4105 - DNA, 41 bp, Homo sapiens
gatgcaaatgccgcccaccaycctggcacctcgtgcgttca

SEQ ID NO: 4106 - DNA, 41 bp, Homo sapiens
cttacatcaaactggggcacycccctctctcaccacccacc

SEQ ID NO: 4107 - DNA, 41 bp, Homo sapiens
gtggctgcgctcagtgacgamcaggagaagtgaaggctgag

SEQ ID NO: 4108 - DNA, 41 bp, Homo sapiens
gacgaacaggagaagtgaagsctgaggcttataggagggtg

SEQ ID NO: 4109 - DNA, 42 bp, Homo sapiens
  misc_feature (21)..(22): at is present or absent.
gctggttcccagtgtcacacatgtgtgtgaggacaggctgca

SEQ ID NO: 4110 - DNA, 41 bp, Homo sapiens
ggtatcattcttccttcctgrgtgatgtggctatttgtgtt

SEQ ID NO: 4111 - DNA, 41 bp, Homo sapiens
gcggagtgggggcagtagtcrtcatcatcactgagttattg

SEQ ID NO: 4112 - DNA, 41 bp, Homo sapiens
tcactgagttattgtgaaccrggaaagagatatgatctgtg

SEQ ID NO: 4113 - DNA, 43 bp, Homo sapiens
  misc_feature (21)..(23): ctt is present or absent.
tattttgaatatcacttcttctttcaatgcttgggaatcacgg

SEQ ID NO: 4114 - DNA, 41 bp, Homo sapiens
gagctccagataccacctgcyccacaaccagacagcctgtt

SEQ ID NO: 4115 - DNA, 41 bp, Homo sapiens
  misc_feature (21)..(21): g is present or absent.
tggagagtgacatggtgggggtgtggtgcatatattcatat

SEQ ID NO: 4116 - DNA, 41 bp, Homo sapiens
ttaaagatcgtctattttggrcaagtgttaataattctcca

SEQ ID NO: 4117 - DNA, 46 bp, Homo sapiens
  misc_feature (21)..(26): ggggct is present or absent.
gtggggctggggctggggctggggctgggtgcgtgcatgtgctaag

SEQ ID NO: 4118 - DNA, 40 bp, Homo sapiens
gtggggctggggctggggctgggtgcgtgcatgtgctaag

SEQ ID NO: 4119 - DNA, 41 bp, Homo sapiens
gttgtggctttgtctaattayagaaatggatccttagagtc

SEQ ID NO: 4120 - DNA, 41 bp, Homo sapiens
aaccatgaggctcaccatatytcaaaccacgctgcacagct

SEQ ID NO: 4121 - DNA, 62 bp, Homo sapiens
  misc_feature (40)..(42): t is present or absent.
ctcttgaaattggtgccagcttttttttttttttttttttttccctgcatttaccaaatatg

SEQ ID NO: 4122 - DNA, 41 bp, Homo sapiens
ttttttttttttttttttttyccctgcatttaccaaatatg

SEQ ID NO: 4123 - DNA, 41 bp, Homo sapiens
ccaaggatttttatttttcarcaacaaaggaaatgatttta

SEQ ID NO: 4124 - DNA, 41 bp, Homo sapiens
gagtcggtcagccgctccccrgtctattcccatttcaacga

SEQ ID NO: 4125 - DNA, 41 bp, Homo sapiens
tcttttttactcactgcagtrtgaggaacaaatcacattta

SEQ ID NO: 4126 - DNA, 47 bp, Homo sapiens
  misc_feature (27)..(27): t is present or absent.
gacccaacactatctcctggtttttttcttccggtcaagtgtcgggc

SEQ ID NO: 4127 - DNA, 41 bp, Homo sapiens
tggagaaaatcattttctccycttggcagtgtcccagggcc

SEQ ID NO: 4128 - DNA, 41 bp, Homo sapiens
ctgatgctcttccaggacacraaaagaacccatctttgaat

SEQ ID NO: 4129 - DNA, 53 bp, Homo sapiens
  misc_feature (32)..(33): t is present or absent.
ccatctttgaatatcaatgatttttttttttttaagtactgttccggggagaa

SEQ ID NO: 4130 - DNA, 41 bp, Homo sapiens
cattagaataggtagtatcarccagccgggcatggtggctc

SEQ ID NO: 4131 - DNA, 41 bp, Homo sapiens; identical to SEQ ID NO: 1339

SEQ ID NO: 4132 - DNA, 41 bp, Homo sapiens; identical to SEQ ID NO: 1341

SEQ ID NO: 4133 - DNA, 41 bp, Homo sapiens; identical to SEQ ID NO: 1340

SEQ ID NO: 4134 - DNA, 41 bp, Homo sapiens; identical to SEQ ID NO: 1355

SEQ ID NO: 4135 - DNA, 41 bp, Homo sapiens; identical to SEQ ID NO: 1342

SEQ ID NO: 4136 - DNA, 41 bp, Homo sapiens; identical to SEQ ID NO: 1348

SEQ ID NO: 4137 - DNA, 41 bp, Homo sapiens; identical to SEQ ID NO: 1343

SEQ ID NO: 4138 - DNA, 41 bp, Homo sapiens; identical to SEQ ID NO: 1344

SEQ ID NO: 4139 - DNA, 41 bp, Homo sapiens; identical to SEQ ID NO: 1345

SEQ ID NO: 4140 - DNA, 41 bp, Homo sapiens; identical to SEQ ID NO: 1349

SEQ ID NO: 4141 - DNA, 41 bp, Homo sapiens; identical to SEQ ID NO: 1347

SEQ ID NO: 4142 - DNA, 41 bp, Homo sapiens; identical to SEQ ID NO: 1356

SEQ ID NO: 4143 - DNA, 41 bp, Homo sapiens
gttaaggatatgtgaactcargtgtgtctataggataaatt

SEQ ID NO: 4144 - DNA, 41 bp, Homo sapiens; identical to SEQ ID NO: 1358

SEQ ID NO: 4145 - DNA, 41 bp, Homo sapiens; identical to SEQ ID NO: 1350

SEQ ID NO: 4146 - DNA, 41 bp, Homo sapiens; identical to SEQ ID NO: 1379

SEQ ID NO: 4147 - DNA, 41 bp, Homo sapiens; identical to SEQ ID NO: 1351

SEQ ID NO: 4148 - DNA, 41 bp, Homo sapiens; identical to SEQ ID NO: 1352

SEQ ID NO: 4149 - DNA, 41 bp, Homo sapiens; identical to SEQ ID NO: 1353

SEQ ID NO: 4150 - DNA, 41 bp, Homo sapiens; identical to SEQ ID NO: 1354

SEQ ID NO: 4151 - DNA, 41 bp, Homo sapiens; identical to SEQ ID NO: 1359

SEQ ID NO: 4152 - DNA, 41 bp, Homo sapiens; identical to SEQ ID NO: 1360

SEQ ID NO: 4153 - DNA, 41 bp, Homo sapiens; identical to SEQ ID NO: 1361

SEQ ID NO: 4154 - DNA, 41 bp, Homo sapiens; identical to SEQ ID NO: 1362

SEQ ID NO: 4155 - DNA, 41 bp, Homo sapiens; identical to SEQ ID NO: 1363

SEQ ID NO: 4156 - DNA, 41 bp, Homo sapiens; identical to SEQ ID NO: 1364

SEQ ID NO: 4157 - DNA, 41 bp, Homo sapiens; identical to SEQ ID NO: 1365

SEQ ID NO: 4158 - DNA, 41 bp, Homo sapiens; identical to SEQ ID NO: 1366

SEQ ID NO: 4159 - DNA, 41 bp, Homo sapiens; identical to SEQ ID NO: 1367

SEQ ID NO: 4160 - DNA, 41 bp, Homo sapiens; identical to SEQ ID NO: 1380

SEQ ID NO: 4161 - DNA, 41 bp, Homo sapiens; identical to SEQ ID NO: 1368

SEQ ID NO: 4162 - DNA, 41 bp, Homo sapiens; identical to SEQ ID NO: 1369

SEQ ID NO: 4163 - DNA, 41 bp, Homo sapiens; identical to SEQ ID NO: 1377

SEQ ID NO: 4164 - DNA, 41 bp, Homo sapiens; identical to SEQ ID NO: 1370

SEQ ID NO: 4165 - DNA, 41 bp, Homo sapiens; identical to SEQ ID NO: 1371

SEQ ID NO: 4166 - DNA, 41 bp, Homo sapiens; identical to SEQ ID NO: 1372

SEQ ID NO: 4167 - DNA, 41 bp, Homo sapiens; identical to SEQ ID NO: 1373

SEQ ID NO: 4168 - DNA, 41 bp, Homo sapiens; identical to SEQ ID NO: 1374

SEQ ID NO: 4169 - DNA, 41 bp, Homo sapiens; identical to SEQ ID NO: 1375

SEQ ID NO: 4170 - DNA, 41 bp, Homo sapiens; identical to SEQ ID NO: 1376

SEQ ID NO: 4171 - DNA, 41 bp, Homo sapiens; identical to SEQ ID NO: 1378

SEQ ID NO: 4172 - DNA, 41 bp, Homo sapiens
tccttctgagccccaacaagyggtgctgagttggcgtctgg

SEQ ID NO: 4173 - DNA, 48 bp, Homo sapiens
  misc_feature (28)..(28): c is present or absent.
ctggggcttcacctgtccttccccccccaaccctgatcaggctgaagc

SEQ ID NO: 4174 - DNA, 41 bp, Homo sapiens
tatttgtacatatatgccctktgtgtgtgtacgcacacacg

SEQ ID NO: 4175 - DNA, 52 bp, Homo sapiens
  misc_feature (31)..(32): a is present or absent.
aaacttggggcaatggaggtaaaaaaaaaaaactgtaaaaaggcatatttgg

SEQ ID NO: 4176 - DNA, 41 bp, Homo sapiens
gcgcacttctccttgatgctygtgagctatacacacctcct

SEQ ID NO: 4177 - DNA, 41 bp, Homo sapiens
gcctgtagtccccagacaggraaatggtcttgaaacactgg

SEQ ID NO: 4178 - DNA, 41 bp, Homo sapiens
agtgaccatgaagtctgccaygagggggcctctgccacgtg

SEQ ID NO: 4179 - DNA, 41 bp, Homo sapiens
ttgtatttttagtagagatgrggttttgccattttggcagg

SEQ ID NO: 4180 - DNA, 41 bp, Homo sapiens
tgtgcccagccagcattctgsttttaatgaggccctctccc

SEQ ID NO: 4181 - DNA, 41 bp, Homo sapiens
ctcacctgacctgcttggggycatgggaatctgacaactga

SEQ ID NO: 4182 - DNA, 41 bp, Homo sapiens
gaggctggtggtgagagcgtsatcgatagggcgtgcagcag

SEQ ID NO: 4183 - DNA, 41 bp, Homo sapiens
  misc_feature (21)..(21): c is present or absent.
ctcattggactctaccctgacaccacctccacgctgctcag

SEQ ID NO: 4184 - DNA, 41 bp, Homo sapiens
ttcttgttgccctttcaatcyccctcattttattttcatgc

SEQ ID NO: 4185 - DNA, 41 bp, Homo sapiens
aacacttccctgaggctgggygtctatgctgctttaggaat

SEQ ID NO: 4186 - DNA, 41 bp, Homo sapiens
cctctgtctgttccatccctstcctaccctcaccccccact

SEQ ID NO: 4187 - DNA, 41 bp, Homo sapiens
atgcaccagccaggcctgaamgaatgagtaagagttggagg

SEQ ID NO: 4188 - DNA, 44 bp, Homo sapiens
  misc_feature (21)..(24): aaga is present or absent.
ttttcttgagcaagccaacaaagagtttcttttctgcaggtcag

SEQ ID NO: 4189 - DNA, 41 bp, Homo sapiens
aaccccctatgattagaactrtagtgctgtttaggaagcca

SEQ ID NO: 4190 - DNA, 51 bp, Homo sapiens
  misc_feature (30)..(31): a is present or absent.
aattcacagttaacaaagctaaaaaaaaaaatccttgttataaattacaca

SEQ ID NO: 4191 - DNA, 41 bp, Homo sapiens
attcatctgggtcatactctygagttacccggctttcttga

SEQ ID NO: 4192 - DNA, 41 bp, Homo sapiens
ggagcggagcccgcggccacygccgcctgatcagcgcgacc

SEQ ID NO: 4193 - DNA, 42 bp, Homo sapiens
  misc_feature (21)..(22): ct is present or absent.
ctttgaccagcttctttcccctgtttccaatactttcacttc

SEQ ID NO: 4194 - DNA, 41 bp, Homo sapiens
ggatggaaatggtgagcacaraccttggcatttaaggaccg

SEQ ID NO: 4195 - DNA, 41 bp, Homo sapiens
ctgttttctacccactggggycagcaaatcagcccctttta

SEQ ID NO: 4196 - DNA, 41 bp, Homo sapiens
tgatgctcaaagcaatacaastagaaaatataggaggctgg

SEQ ID NO: 4197 - DNA, 41 bp, Homo sapiens
aagggggagtcatactccagygtgcattttagtttgtgctt

SEQ ID NO: 4198 - DNA, 49 bp, Homo sapiens
  misc_feature (29)..(29): t is present or absent.
tttgtgttgttatttgcgtctttttttttcctggaaggaagtgattggc

SEQ ID NO: 4199 - DNA, 41 bp, Homo sapiens
ccagggaactggtggcacacsctgagtctgctaggtgggct

SEQ ID NO: 4200 - DNA, 41 bp, Homo sapiens
ggctaaagactcacaacctgwgggaaggggccaggaaagaa

SEQ ID NO: 4201 - DNA, 41 bp, Homo sapiens
cctgagggaaggggccaggaragaaaggaagccatggccta

SEQ ID NO: 4202 - DNA, 41 bp, Homo sapiens
gggtgttatttgggaccccaygcccatccaggccgacagag

SEQ ID NO: 4203 - DNA, 41 bp, Homo sapiens
accaagcaggggaggtgagawttgtgcagactggggatatt

SEQ ID NO: 4204 - DNA, 41 bp, Homo sapiens
ttgcttgaataaaaggatgcragtcactgtattggtgaagt

SEQ ID NO: 4205 - DNA, 41 bp, Homo sapiens
ttctttcaaatccaattcctractgatttccttgccttcca

SEQ ID NO: 4206 - DNA, 41 bp, Homo sapiens
gaagtttaccgaaaaacaaarcaagaaactccccagtaaaa

SEQ ID NO: 4207 - DNA, 41 bp, Homo sapiens
tgtggctatggggaacatgargctcatagaaactgaagact

SEQ ID NO: 4208 - DNA, 41 bp, Homo sapiens
gcctgggggaaactcctgttkcctgtgcctccgtagaggtc

SEQ ID NO: 4209 - DNA, 41 bp, Homo sapiens
gaggtctgtccctctaggtgraagtgttgtggttggaggag

SEQ ID NO: 4210 - DNA, 41 bp, Homo sapiens
aggaggttgtctggcttatcygtgctactgatggggcttca

SEQ ID NO: 4211 - DNA, 41 bp, Homo sapiens
ttacgaagctttttcctcatygtaggttctgggataaagaa

SEQ ID NO: 4212 - DNA, 41 bp, Homo sapiens
ggccttgcacctgggctggcrgtggtgccccagaggctgga

SEQ ID NO: 4213 - DNA, 41 bp, Homo sapiens
gtgtgtcttccttgttgtcgragtggattgctggttggaag

SEQ ID NO: 4214 - DNA, 41 bp, Homo sapiens
acattccatgaaaaatcaaaracagccagaagggcaataac

SEQ ID NO: 4215 - DNA, 41 bp, Homo sapiens
aggggtggatgttgctgttgytacaaaagggtggctttaaa

SEQ ID NO: 4216 - DNA, 41 bp, Homo sapiens
tgctggggtgtcccagcgatrgtgtttccacatggccccga

SEQ ID NO: 4217 - DNA, 41 bp, Homo sapiens
tagtgtttccacatggccccratcagtttcagttggaaaga

SEQ ID NO: 4218 - DNA, 41 bp, Homo sapiens
  misc_feature (21)..(21): g is present or absent.
gggctgccagccacttgggggtggggtctctaacccacaga

SEQ ID NO: 4219 - DNA, 40 bp, Homo sapiens
gggctgccagccacttggggtggggtctctaacccacaga

SEQ ID NO: 4220 - DNA, 41 bp, Homo sapiens
cagatggtgactggactacartgagatttgggtaagctttt

SEQ ID NO: 4221 - DNA, 41 bp, Homo sapiens
gaagtagaggctgtagaagcrtgaatttctcctgagacttg

SEQ ID NO: 4222 - DNA, 41 bp, Homo sapiens
gacaggccccactctggtgcwaggagcatggtaatctttac

SEQ ID NO: 4223 - DNA, 41 bp, Homo sapiens
gatcgaggggagctttaataygggtacagttggtggagagc

SEQ ID NO: 4224 - DNA, 44 bp, Homo sapiens
  misc_feature (21)..(24): cttt is present or absent.
ttggtggagagctggtctttcttttagcggggtggttattgggc

SEQ ID NO: 4225 - DNA, 40 bp, Homo sapiens
ttggtggagagctggtcttttagcggggtggttattgggc

SEQ ID NO: 4226 - DNA, 41 bp, Homo sapiens
cattgactgatggtctgggcrgatgtcaagttccctgtttt

SEQ ID NO: 4227 - DNA, 41 bp, Homo sapiens
tgcttggcaaggatgaagacsccagatgagtcactagtatg

SEQ ID NO: 4228 - DNA, 41 bp, Homo sapiens
aagtaatccttggattttttyttttcttttccttctagcag

SEQ ID NO: 4229 - DNA, 41 bp, Homo sapiens
  misc_feature (21)..(21): t is present or absent.
aatccttggatttttttttttcttttccttctagcagtgaa

SEQ ID NO: 4230 - DNA, 41 bp, Homo sapiens
aaaaaccagcattactcaccratgagcccatttgcttgact

SEQ ID NO: 4231 - DNA, 41 bp, Homo sapiens
aaaggcaaagagcactgagcrtctggctgatagcccaggtg

SEQ ID NO: 4232 - DNA, 41 bp, Homo sapiens
gttaaaattgcattccctacrtcttgttcagaaggtaagcc

SEQ ID NO: 4233 - DNA, 41 bp, Homo sapiens
gctcaatttctgctgtgtttratttttgactccacactacc

SEQ ID NO: 4234 - DNA, 41 bp, Homo sapiens
  misc_feature (21)..(21): c is present or absent.
ccaagagcctggaatcctcccaagtctggttcttttcccca

SEQ ID NO: 4235 - DNA, 41 bp, Homo sapiens
  misc_feature (21)..(21): a is present or absent.
gtcttgaccaaaaaaaaaaaatttagctctacatgatggtg

SEQ ID NO: 4236 - DNA, 41 bp, Homo sapiens
actatactccagcatgggtgrcagagcaagcaatatctgaa

SEQ ID NO: 4237 - DNA, 41 bp, Homo sapiens
tgaggttacgagtagccatgkgccatatgatttatcggaag

SEQ ID NO: 4238 - DNA, 43 bp, Homo sapiens
  misc_feature (21)..(23): gtt is present or absent.
ttatggaaatttttgttgttgttcattaaaaccttcacttaca

SEQ ID NO: 4239 - DNA, 40 bp, Homo sapiens
  misc_feature (21)..(21): t is present or absent.
tgacatctgtcatttttttttctgctgcacaaatctcttc

SEQ ID NO: 4240 - DNA, 40 bp, Homo sapiens
tgacatctgtcattttttttcctgctgcacaaatctcttc

SEQ ID NO: 4241 - DNA, 41 bp, Homo sapiens
atgttttgttctagatagtasagttttcttgtaatctcaaa

SEQ ID NO: 4242 - DNA, 41 bp, Homo sapiens
acttccaccattcacagtatygttcttaatggcatgcggat

SEQ ID NO: 4243 - DNA, 41 bp, Homo sapiens
agatccttcatttcctagggygtacaaatttcaaggctttt

SEQ ID NO: 4244 - DNA, 41 bp, Homo sapiens
ttgctatgctagattgatttyctccccaagagttgttaatt

SEQ ID NO: 4245 - DNA, 41 bp, Homo sapiens
agttgtctggcttacagtagrtgcttactaaatggtagctt

SEQ ID NO: 4246 - DNA, 41 bp, Homo sapiens
agcttcacctgtttcagcccygcttccatgagcttcacctg

SEQ ID NO: 4247 - DNA, 41 bp, Homo sapiens
attcagcagcctccacatccyccttctccgtacttctgtcc

SEQ ID NO: 4248 - DNA, 41 bp, Homo sapiens
gcctccacatcctccttctcygtacttctgtcctagctagg

SEQ ID NO: 4249 - DNA, 41 bp, Homo sapiens
ccacccagtgtccctcagttmgaactgtccccagttctctg

SEQ ID NO: 4250 - DNA, 41 bp, Homo sapiens
ttgatactccatatttgtcayttcccattgaacacattgaa

SEQ ID NO: 4251 - DNA, 41 bp, Homo sapiens
ggtgaagagactaaggccccrtgtgtttaataatgttgcac

SEQ ID NO: 4252 - DNA, 41 bp, Homo sapiens
tgttcctctgacagcctctcygttcttccctaatttggctc

SEQ ID NO: 4253 - DNA, 41 bp, Homo sapiens
gtccttttgtacttgggggcrtgtccaaattcattaaatga

SEQ ID NO: 4254 - DNA, 41 bp, Homo sapiens
agatttttcttcttcctaccyctcgctttgctgtcctgaca

SEQ ID NO: 4255 - DNA, 41 bp, Homo sapiens
ccttttattctttctggaggyaggggctcactctgttcaca

SEQ ID NO: 4256 - DNA, 41 bp, Homo sapiens
aagggatcacgccttgttgcrcaggctggtctcaagattct

SEQ ID NO: 4257 - DNA, 41 bp, Homo sapiens
ccagaatggcttcacctgtgstgggtgcttggctttctgct

SEQ ID NO: 4258 - DNA, 41 bp, Homo sapiens
ggctcagccaagggggcctcygtccttatgctgaaggcaaa

SEQ ID NO: 4259 - DNA, 42 bp, Homo sapiens
  misc_feature (21)..(21): at is present or absent.
tgtgttagagctgttttcacatgtgtatatatgtgtgttatt

SEQ ID NO: 4260 - DNA, 40 bp, Homo sapiens
tgtgttagagctgttttcacgtgtatatatgtgtgttatt

SEQ ID NO: 4261 - DNA, 41 bp, Homo sapiens
tttgttgttgttgcccaggawggtctcaaactcctgggttc

SEQ ID NO: 4262 - DNA, 41 bp, Homo sapiens
tatttagcatcactatgttcsagtgtaatgacatttaactc

SEQ ID NO: 4263 - DNA, 41 bp, Homo sapiens
tccagtgtaatgacatttaaytctctcataaccaaaacgtg

SEQ ID NO: 4264 - DNA, 41 bp, Homo sapiens
tcagggaattgtggtccaatwtgcagctagggaagaaatcc

SEQ ID NO: 4265 - DNA, 41 bp, Homo sapiens
gaaaccttaatttcccctcakgtacatagtttctggtggga

SEQ ID NO: 4266 - DNA, 41 bp, Homo sapiens
tcaccctcctgagtgactagrgaaagtccagctagcccctc

SEQ ID NO: 4267 - DNA, 41 bp, Homo sapiens
ccagtgctcaataggtttacygtgtgcatagttttttattt

SEQ ID NO: 4268 - DNA, 41 bp, Homo sapiens
tgtttgtaagtgcaggatggrggacacatctctgccctgta

SEQ ID NO: 4269 - DNA, 41 bp, Homo sapiens
tggcttgcttatttactgaarctatgttacaaagattctca

SEQ ID NO: 4270 - DNA, 41 bp, Homo sapiens
cacggcaggaagctgcacccyggggctggagatgatgtctg

SEQ ID NO: 4271 - DNA, 41 bp, Homo sapiens
agatttgggagcagagggcgrgggtctcttctgagggtact

SEQ ID NO: 4272 - DNA, 41 bp, Homo sapiens
agcagcactcctgcccagccmcactgcctccgtcctcccct

SEQ ID NO: 4273 - DNA, 41 bp, Homo sapiens
  misc_feature (21)..(21): g is present or absent.
gtaaatttttcattttgaaggttatcttgatctcttattcc

SEQ ID NO: 4274 - DNA, 41 bp, Homo sapiens
ggtgttccacccttcagggaygccagattcattttgaagaa

SEQ ID NO: 4275 - DNA, 41 bp, Homo sapiens
gagcatttaccaaagtgtgtygtgcagaagaatagccactt

SEQ ID NO: 4276 - DNA, 41 bp, Homo sapiens
gggcaaggctgcattgcagtrgcttattcttgtctcgagtg

SEQ ID NO: 4277 - DNA, 41 bp, Homo sapiens
ttttagggagttgagaaacasatggcaaattttgctagttt

SEQ ID NO: 4278 - DNA, 41 bp, Homo sapiens
actggaattattctggcttgyaggtacagagattgcatgtg

SEQ ID NO: 4279 - DNA, 41 bp, Homo sapiens
catgtgtaatcaaaacctgcyggacagaaatggtcctgagc

SEQ ID NO: 4280 - DNA, 57 bp, Homo sapiens
  misc_feature (36)..(37): a is present or absent.
tcctggccaccctcccccgcaaaaaaaaaaaaaaaaagtcctagaggaaaaaatagg

SEQ ID NO: 4281 - DNA, 41 bp, Homo sapiens
ataagttcatcgagctaaaartatatttgagataaaataat

SEQ ID NO: 4282 - DNA, 41 bp, Homo sapiens
agagtagagacaaagaaatgmcaccttgatctgtaagaggg

SEQ ID NO: 4283 - DNA, 41 bp, Homo sapiens
ctatgacaggttagaagtgasgtccttgggaccaacatagg

SEQ ID NO: 4284 - DNA, 41 bp, Homo sapiens
tgacgtccttgggaccaacayagggctttcttgggaaggct

SEQ ID NO: 4285 - DNA, 41 bp, Homo sapiens
tgaacacttaaaacccacagrcatgtaggcctggcttgcct

SEQ ID NO: 4286 - DNA, 41 bp, Homo sapiens
acccacaggcatgtaggcctkgcttgcctttgaaactagtt

SEQ ID NO: 4287 - DNA, 41 bp, Homo sapiens
aatgttctcaacgagttagamaattggattgaacaatatgc

SEQ ID NO: 4288 - DNA, 41 bp, Homo sapiens
taatttagaactttttgtttrcctcttccatgacttaattc

SEQ ID NO: 4289 - DNA, 41 bp, Homo sapiens
tggattctgtggtttcagggytctattccatgatattggta

SEQ ID NO: 4290 - DNA, 41 bp, Homo sapiens
tttggacttctgcctgtttcyccacagctttgtcaacagag

SEQ ID NO: 4291 - DNA, 41 bp, Homo sapiens
cctactggtgttccatgtccrttacaaagacctgcgaaaaa

SEQ ID NO: 4292 - DNA, 41 bp, Homo sapiens
cccaaattgtggttcattttyaaaaaaatgtatttatctaa

SEQ ID NO: 4293 - DNA, 41 bp, Homo sapiens
atggaggaggaaatgtaaccragaagctagatcttaactgg

SEQ ID NO: 4294 - DNA, 41 bp, Homo sapiens
  misc_feature (21)..(21): t is present or absent.
aattaaaaataatgtttttttcacataacaatggttatatg

SEQ ID NO: 4295 - DNA, 41 bp, Homo sapiens
ttttggcataatttttaatcyactagaatgttctgattcat

SEQ ID NO: 4296 - DNA, 41 bp, Homo sapiens
tacgtgatggcctgaagagaraaaccgtacattggttcttt

SEQ ID NO: 4297 - DNA, 41 bp, Homo sapiens
aagagttcagagattttgggrgttggaggaaaaaatagcat

SEQ ID NO: 4298 - DNA, 41 bp, Homo sapiens
  misc_feature (21)..(21): t is present or absent.
cattatttttaatttttttttcctcctgttggtgtcagaat

SEQ ID NO: 4299 - DNA, 41 bp, Homo sapiens
gagaaacttacattatttttwaaaaatgctataactagtcc

SEQ ID NO: 4300 - DNA, 41 bp, Homo sapiens
tgggagtgccctgggctagcrctgaaacttcaggttttcag

SEQ ID NO: 4301 - DNA, 41 bp, Homo sapiens
agacttttggaagaagcagawctgaaggtaagactgagtaa

SEQ ID NO: 4302 - DNA, 41 bp, Homo sapiens
gtgctatttctgagcactcayggccccattgggcatgggct

SEQ ID NO: 4303 - DNA, 41 bp, Homo sapiens
tgttttgctcaccccctacayagcttgccctcatgcttctc

SEQ ID NO: 4304 - DNA, 41 bp, Homo sapiens
agcaacagacttggagacttragcttctaaaagtttcatta

SEQ ID NO: 4305 - DNA, 41 bp, Homo sapiens
cgaatgtgatgaatgtgggarcctttttgagatagcagcac

SEQ ID NO: 4306 - DNA, 41 bp, Homo sapiens
gagtctaaattaaatatgagmaaaactagaaaccatttaaa

SEQ ID NO: 4307 - DNA, 41 bp, Homo sapiens
acagatttgcaagagtctacmaaagtgataatattctgtca

SEQ ID NO: 4308 - DNA, 41 bp, Homo sapiens
aagccgagtcaatctcttggstatcttctgtggactacttt

SEQ ID NO: 4309 - DNA, 41 bp, Homo sapiens
gttcccatgagggctgacccygcctcaccctggtaacccgc

SEQ ID NO: 4310 - DNA, 41 bp, Homo sapiens
  misc_feature (21)..(21): t is present or absent.
cggggttagcttccctagcttgcggagggtttctgagaaaa

SEQ ID NO: 4311 - DNA, 40 bp, Homo sapiens
cggggttagcttccctagctgcggagggtttctgagaaaa

SEQ ID NO: 4312 - DNA, 41 bp, Homo sapiens
taaagacatgctggtaattaygtaaaataaagataagtcaa

SEQ ID NO: 4313 - DNA, 41 bp, Homo sapiens
tgtaagggcagaatcagcagyaacgattggatgttcccgga

SEQ ID NO: 4314 - DNA, 41 bp, Homo sapiens
  misc_feature (21)..(21): a is present or absent.
agcaggctggggaaaaaaaaatacagaggttatcattatgt

SEQ ID NO: 4315 - DNA, 55 bp, Homo sapiens
  misc_feature (34)..(35): t is present or absent.
aagggcaaatacttaggcactttttttttttttttggatagaaccaggtgtggtt

SEQ ID NO: 4316 - DNA, 53 bp, Homo sapiens
  misc_feature (33)..(33): a is present or absent.
ctaagtcttaagctgtctttaaaaaaaaaaaaaccaacaatcctacagaaata

SEQ ID NO: 4317 - DNA, 41 bp, Homo sapiens
  misc_feature (21)..(21): t is present or absent.
caagctggggcactttttttttcccaagtgtttattttgga

SEQ ID NO: 4318 - DNA, 41 bp, Homo sapiens
aagctggggcacttttttttycccaagtgtttattttggaa

SEQ ID NO: 4319 - DNA, 41 bp, Homo sapiens
  misc_feature (21)..(21): t is present or absent.
ggacctctgatttttttttttcttttgcaaacatttttaaa

SEQ ID NO: 4320 - DNA, 55 bp, Homo sapiens
  misc_feature (34)..(35): a is present or absent.
tccctacacacccctcatctaaaaaaaaaaaaaaatcagcagcttgactgagctt

SEQ ID NO: 4321 - DNA, 41 bp, Homo sapiens
ggttttttccagtgtgatagyacatgtagaaagcagtactg

SEQ ID NO: 4322 - DNA, 41 bp, Homo sapiens
gcgttgagtcatgaagccgayagtgccgcttgtgcatcgca

SEQ ID NO: 4323 - DNA, 41 bp, Homo sapiens
acgtcccccactgttctatcyttctcaagaagcaagcgttg

SEQ ID NO: 4324 - DNA, 41 bp, Homo sapiens
ccttgcacgtgctcatacatrtcatttgctattgttatcat

SEQ ID NO: 4325 - DNA, 41 bp, Homo sapiens
  misc_feature (21)..(21): a is present or absent.
gtgttaaagctaaaaaaaaaaccctgttagacattttgact

SEQ ID NO: 4326 - DNA, 41 bp, Homo sapiens
ttgaccctgccctgaaacccwgttggagataaaacagtggc

SEQ ID NO: 4327 - DNA, 41 bp, Homo sapiens
gtgccctactccacgtaaaamtcttctgtagctcaactgag

SEQ ID NO: 4328 - DNA, 41 bp, Homo sapiens
gcctggtgcatgaggttgagraaaattctcagcaggagagt

SEQ ID NO: 4329 - DNA, 41 bp, Homo sapiens
cccttttgattaaaattgcabtgggacaagaaccaccccca

SEQ ID NO: 4330 - DNA, 41 bp, Homo sapiens
ttgcactgaggtaatggctgmagaaattaaagtgagggtat

SEQ ID NO: 4331 - DNA, 51 bp, Homo sapiens
  misc_feature (26)..(31): a is present or absent.
tgcatcctgtgatttttttctttttttttttaatcctgccgcctggatctc

SEQ ID NO: 4332 - DNA, 41 bp, Homo sapiens
tatgtttaattgcttttactsttattgctttttttaattgg

SEQ ID NO: 4333 - DNA, 49 bp, Homo sapiens
  misc_feature (29)..(29): t is present or absent.
taattggatgaaaggattgttttttttttcacccaatagagcatgtttt

SEQ ID NO: 4334 - DNA, 40 bp, Homo sapiens
  misc_feature (21)..(21): t is present or absent.
tagatatgatcttttttttttaatctctattgtgaagtag

SEQ ID NO: 4335 - DNA, 41 bp, Homo sapiens
atcctcttttttctaatacgyaccactatctccacattaaa

SEQ ID NO: 4336 - DNA, 41 bp, Homo sapiens
gaaaaacaacctgtgtcctgyttggaggttcagcatattct

SEQ ID NO: 4337 - DNA, 41 bp, Homo sapiens
tagatgttctttgggcattgraaagatggtgttatctgttt

SEQ ID NO: 4338 - DNA, 41 bp, Homo sapiens
gtttaataaggtttaattagytctactttgttaattacatt

SEQ ID NO: 4339 - DNA, 41 bp, Homo sapiens
ctttgatgctatggttttcartccacagatgttcataactt

SEQ ID NO: 4340 - DNA, 41 bp, Homo sapiens
ttccactatgaattatatttyctgccattttaacacacctt

SEQ ID NO: 4341 - DNA, 41 bp, Homo sapiens
aatggttttggtcctaaatcyacactggttcaaaactagac

SEQ ID NO: 4342 - DNA, 41 bp, Homo sapiens
aggtgtgtctcctgtatatgrcgtggttaggttttactctg

SEQ ID NO: 4343 - DNA, 41 bp, Homo sapiens
acgtttatcagaaaacctgtmtctcttctagttcagctaga

SEQ ID NO: 4344 - DNA, 41 bp, Homo sapiens
atctatgaatcagagtgatcrgaactaaaatggatctacag

SEQ ID NO: 4345 - DNA, 50 bp, Homo sapiens
  misc_feature (30)..(30): t is present or absent.
acattctttttatgcttaccttttttttttctaggtatacttcaaaagaa

SEQ ID NO: 4346 - DNA, 41 bp, Homo sapiens
agtccgttccgaaggcatttkccactagtttttggactatg

SEQ ID NO: 4347 - DNA, 41 bp, Homo sapiens
atttttaaaggagtaggacaragttgtcacaggtttttgtt

SEQ ID NO: 4348 - DNA, 51 bp, Homo sapiens
  misc_feature (31)..(31): a is present or absent.
tgtaccccttactccccatcaaaaaaaaaaatggatacatggttaaaggat

SEQ ID NO: 4349 - DNA, 41 bp, Homo sapiens
aaaggtgctttgatactgaargacacaaatgtgaccgtcca

SEQ ID NO: 4350 - DNA, 41 bp, Homo sapiens
cctccctgaaattgcatataygtatatagacatgcacacgt

SEQ ID NO: 4351 - DNA, 41 bp, Homo sapiens
tttaggtgactgaaattgcawcagtgatcataatgaggttt

SEQ ID NO: 4352 - DNA, 41 bp, Homo sapiens
ttctgccacacagagccgcgsgtggctttgtgtttatcaca

SEQ ID NO: 4353 - DNA, 41 bp, Homo sapiens
tgagttccagtgacctcctcygtttcaaactgctcaccgcc

SEQ ID NO: 4354 - DNA, 41 bp, Homo sapiens
  misc_feature (21)..(21): a is present or absent.
agaaagtctttaaaaaaaaaaccaacctttctattgtatac

SEQ ID NO: 4355 - DNA, 41 bp, Homo sapiens
gaatgcatcgctactaagtayttttgtaagttcagacacca

SEQ ID NO: 4356 - DNA, 41 bp, Homo sapiens
tttttgtaagttcagacaccwtctagaatctgcttgaccgt

SEQ ID NO: 4357 - DNA, 41 bp, Homo sapiens
tgaaataaagcattcgcacayctacccactttcttcgggac

SEQ ID NO: 4358 - DNA, 41 bp, Homo sapiens
ttggctggcattaggctggcrttacttcagctaacatgaag

SEQ ID NO: 4359 - DNA, 41 bp, Homo sapiens
ttgaacactcttcaagatgcrtgcacagcactgaaccgagt

SEQ ID NO: 4360 - DNA, 41 bp, Homo sapiens
tgcatgcacagcactgaaccragtggtctggtgcagataaa

SEQ ID NO: 4361 - DNA, 41 bp, Homo sapiens
  misc_feature (21)..(21): a is present or absent.
atagaagcttaaactcacaaacacgtactctacatagatga

SEQ ID NO: 4362 - DNA, 40 bp, Homo sapiens
atagaagcttaaactcacaacacgtactctacatagatga

SEQ ID NO: 4363 - DNA, 41 bp, Homo sapiens
taccaaagcctgctcatggargtagaaagcaagactgacat

SEQ ID NO: 4364 - DNA, 41 bp, Homo sapiens
ccaaagcctgctcatggaggyagaaagcaagactgacatgt

SEQ ID NO: 4365 - DNA, 41 bp, Homo sapiens
tggatggaacctcaaaggccrtcttgcccagtccccattta

SEQ ID NO: 4366 - DNA, 41 bp, Homo sapiens
aggagacgccacgacactgayagctgtacctgacctgaggg

SEQ ID NO: 4367 - DNA, 41 bp, Homo sapiens
ccgattgtgccccagataccrctttatttgaggggtgtgcc

SEQ ID NO: 4368 - DNA, 41 bp, Homo sapiens
taccctgctgttgtccggcckccaggaagggattggattgt

SEQ ID NO: 4369 - DNA, 41 bp, Homo sapiens
cccagaggcctccgtgcaggsgaaaagcccttggttgccct

SEQ ID NO: 4370 - DNA, 41 bp, Homo sapiens
tttgttaggataaaattgcaytgagtgcctgttctaaacca

SEQ ID NO: 4371 - DNA, 41 bp, Homo sapiens
ccgggctggtgagccagcacygggaacataccaagtgcctg

SEQ ID NO: 4372 - DNA, 42 bp, Homo sapiens
  misc_feature (21)..(22): ct is present or absent.
cgcctcctgcagtgctctctcttggtgaatgctaactctgct

SEQ ID NO: 4373 - DNA, 41 bp, Homo sapiens
acccagagagagtctgggttytggaattcagcgtagctacc

SEQ ID NO: 4374 - DNA, 41 bp, Homo sapiens
ttggctttcttttgttgtggytttttgttttatttttgtca

SEQ ID NO: 4375 - DNA, 41 bp, Homo sapiens
cacttttattaaagacagtaygattacataacatttggccc

SEQ ID NO: 4376 - DNA, 41 bp, Homo sapiens
cagtacgattacataacattkggcccatcctagcaagcagg

SEQ ID NO: 4377 - DNA, 41 bp, Homo sapiens
caaaacaaaacaaacaaacaracaaaaaaaaaataccacat

SEQ ID NO: 4378 - DNA, 41 bp, Homo sapiens
catatggagatgatgctgtgktcctctccttactggacctg

SEQ ID NO: 4379 - DNA, 41 bp, Homo sapiens
tgtgggctggaattccttgaygttgccactgcatagattag

SEQ ID NO: 4380 - DNA, 41 bp, Homo sapiens
catggggctggagctgtgaaraccagtaggtactggcatgt

SEQ ID NO: 4381 - DNA, 41 bp, Homo sapiens
atcctttgaataactctttargggagagaaatgatggaaat

SEQ ID NO: 4382 - DNA, 41 bp, Homo sapiens
gaagtttagaatcatgacacytcggggaagataggatcagg

SEQ ID NO: 4383 - DNA, 41 bp, Homo sapiens
ctttgaagacatgagagtttyttggcaagaagatgttctct

SEQ ID NO: 4384 - DNA, 41 bp, Homo sapiens
cagttaaatgtcattaggtcygctttaggctggctgagggg

SEQ ID NO: 4385 - DNA, 41 bp, Homo sapiens
tgactgttgtcccagctggarccatttggtctcatgccttc

SEQ ID NO: 4386 - DNA, 41 bp, Homo sapiens
tgccacaggtatgcccgtgtrttgaaaatgtcagagataag

SEQ ID NO: 4387 - DNA, 41 bp, Homo sapiens
gtattgaaaatgtcagagatragagatgagcagacacccta

SEQ ID NO: 4388 - DNA, 41 bp, Homo sapiens
gtagcatccctaaaccaagayaaatgtctactatcagtccc

SEQ ID NO: 4389 - DNA, 41 bp, Homo sapiens
ggcaaggaatgtttggcttcygtcatgctttccatcttggc

SEQ ID NO: 4390 - DNA, 41 bp, Homo sapiens
ttctatccagatatttttaaractacaagtaagcgtgtgca

SEQ ID NO: 4391 - DNA, 41 bp, Homo sapiens
  misc_feature (21)..(21): t is present or absent.
tgactggagacttttttttttaaatattattagatcaattc

SEQ ID NO: 4392 - DNA, 41 bp, Homo sapiens
gactggagacttttttttttwaatattattagatcaattca

SEQ ID NO: 4393 - DNA, 41 bp, Homo sapiens
ggtaatggccttttttgaaakttttagatttgtcatcaaag

SEQ ID NO: 4394 - DNA, 41 bp, Homo sapiens
ggacacctgcaggctatctgytctcatccgttgtgtattag

SEQ ID NO: 4395 - DNA, 41 bp, Homo sapiens
ggaccagtaggaacagagccrtccctgggccctgaccactc

SEQ ID NO: 4396 - DNA, 41 bp, Homo sapiens
ttaaccagaagaaaaaaggcrgtggggtggggagacagcca

SEQ ID NO: 4397 - DNA, 41 bp, Homo sapiens
  misc_feature (21)..(21): a is present or absent.
tcttgagacgaaaaaaaaaaatcagagcatccaggtttcta

SEQ ID NO: 4398 - DNA, 42 bp, Homo sapiens
  misc_feature (21)..(22): at is present or absent.
gaggaaatgcagcggaatatatcaactctggttttaacaggg

SEQ ID NO: 4399 - DNA, 40 bp, Homo sapiens
gaggaaatgcagcggaatatcaactctggttttaacaggg

SEQ ID NO: 4400 - DNA, 41 bp, Homo sapiens
atcccacagaatctccagcartctctcaaccgtgcttggaa

SEQ ID NO: 4401 - DNA, 41 bp, Homo sapiens
gtgctggagaggttaggattrcggtcagtggtggtacaaag

SEQ ID NO: 4402 - DNA, 41 bp, Homo sapiens
tgatgataaaaattacccaarcagttatatcacagcatttt

SEQ ID NO: 4403 - DNA, 41 bp, Homo sapiens
acagggtggcagctacctctstgtggctactatggttgtcc

SEQ ID NO: 4404 - DNA, 41 bp, Homo sapiens
taccgagaaaacctccctctygtcctaaagaaagtatcctt

SEQ ID NO: 4405 - DNA, 41 bp, Homo sapiens
ctgggcccagggctctgctcygtgacttcggacaagttatt

SEQ ID NO: 4406 - DNA, 41 bp, Homo sapiens
ccgagggtgaattgctgtgtygtctcacactttgggagata

SEQ ID NO: 4407 - DNA, 41 bp, Homo sapiens
gttttttcctctgctctatcrggattcttctcatttgaaga

SEQ ID NO: 4408 - DNA, 59 bp, Homo sapiens
  misc_feature (21)..(39): tgtccaaagg aaggacacg is present or absent.
gtgtccaaaggaaggacacgtgtccaaaggaaggacacgcttatgttctccttgtggcc

SEQ ID NO: 4409 - DNA, 40 bp, Homo sapiens
gtgtccaaaggaaggacacgcttatgttctccttgtggcc

SEQ ID NO: 4410 - DNA, 41 bp, Homo sapiens
acatgattttccacggctacrtagaagtccatcataggaat

SEQ ID NO: 4411 - DNA, 41 bp, Homo sapiens
aataaaaaaataaggggggargtgcacgcagggctagttga

SEQ ID NO: 4412 - DNA, 41 bp, Homo sapiens
cccctctgccgcctccccacrgccgctccaggggtggctgg

SEQ ID NO: 4413 - DNA, 41 bp, Homo sapiens
agtctatccacagagagtccyactgcctcaggttcctatgg

SEQ ID NO: 4414 - DNA, 56 bp, Homo sapiens
  misc_feature (33)..(34): tc is present or absent.
  misc_feature (35)..(36): tc is present or absent.
tcaccgcagtcgtcgcacagtctctctctctctctcccctcaaagtctgcaacttt

SEQ ID NO: 4415 - DNA, 41 bp, Homo sapiens
attattttggattttgtaaamctcttcgtgtatcaaacaat

SEQ ID NO: 4416 - DNA, 41 bp, Homo sapiens
  misc_feature (21)..(21): c is present or absent.
cccgcagacctggcacagccctgttctcaaaggggagctcc

SEQ ID NO: 4417 - DNA, 41 bp, Homo sapiens
cccagctaggacaggccagcrccaggcagttaggaccgtgg

SEQ ID NO: 4418 - DNA, 41 bp, Homo sapiens; identical to SEQ ID NO: 1823

SEQ ID NO: 4419 - DNA, 41 bp, Homo sapiens; identical to SEQ ID NO: 1824
  misc_feature (21)..(21): t is present or absent.

SEQ ID NO: 4420 - DNA, 41 bp, Homo sapiens; identical to SEQ ID NO: 1825

SEQ ID NO: 4421 - DNA, 41 bp, Homo sapiens; identical to SEQ ID NO: 1826

SEQ ID NO: 4422 - DNA, 41 bp, Homo sapiens; identical to SEQ ID NO: 1827

SEQ ID NO: 4423 - DNA, 41 bp, Homo sapiens; identical to SEQ ID NO: 1828

SEQ ID NO: 4424 - DNA, 41 bp, Homo sapiens
  misc_feature (21)..(21): t is present or absent.
attacacagtatttttttttnaattttggggaaagtcgatt

SEQ ID NO: 4425 - DNA, 41 bp, Homo sapiens; identical to SEQ ID NO: 1830
  misc_feature (21)..(21): c is present or absent.

SEQ ID NO: 4426 - DNA, 41 bp, Homo sapiens; identical to SEQ ID NO: 1831

SEQ ID NO: 4427 - DNA, 41 bp, Homo sapiens; identical to SEQ ID NO: 1832

SEQ ID NO: 4428 - DNA, 41 bp, Homo sapiens; identical to SEQ ID NO: 1833

SEQ ID NO: 4429 - DNA, 41 bp, Homo sapiens; identical to SEQ ID NO: 1834

SEQ ID NO: 4430 - DNA, 41 bp, Homo sapiens; identical to SEQ ID NO: 1835

SEQ ID NO: 4431 - DNA, 41 bp, Homo sapiens; identical to SEQ ID NO: 1836

SEQ ID NO: 4432 - DNA, 41 bp, Homo sapiens; identical to SEQ ID NO: 1837

SEQ ID NO: 4433 - DNA, 41 bp, Homo sapiens; identical to SEQ ID NO: 1838
  misc_feature (21)..(21): a is present or absent.

SEQ ID NO: 4434 - DNA, 41 bp, Homo sapiens; identical to SEQ ID NO: 1839

SEQ ID NO: 4435 - DNA, 41 bp, Homo sapiens; identical to SEQ ID NO: 1840
  misc_feature (21)..(21): t is present or absent.

SEQ ID NO: 4436 - DNA, 41 bp, Homo sapiens; identical to SEQ ID NO: 1841

SEQ ID NO: 4437 - DNA, 41 bp, Homo sapiens; identical to SEQ ID NO: 1842

SEQ ID NO: 4438 - DNA, 41 bp, Homo sapiens; identical to SEQ ID NO: 1843

SEQ ID NO: 4439 - DNA, 41 bp, Homo sapiens; identical to SEQ ID NO: 1844

SEQ ID NO: 4440 - DNA, 41 bp, Homo sapiens; identical to SEQ ID NO: 1845

SEQ ID NO: 4441 - DNA, 41 bp, Homo sapiens; identical to SEQ ID NO: 1846

SEQ ID NO: 4442 - DNA, 68 bp, Homo sapiens
  misc_feature (45)..(48): gatt is present or absent.
gattgattgattgattgattgattgattgattgattgattgattgatttacagagatcagagagctgg

SEQ ID NO: 4443 - DNA, 41 bp, Homo sapiens; identical to SEQ ID NO: 1848
  misc_feature (21)..(21): t is present or absent.

SEQ ID NO: 4444 - DNA, 40 bp, Homo sapiens; identical to SEQ ID NO: 1849

SEQ ID NO: 4445 - DNA, 41 bp, Homo sapiens; identical to SEQ ID NO: 1850

SEQ ID NO: 4446 - DNA, 41 bp, Homo sapiens; identical to SEQ ID NO: 1851

SEQ ID NO: 4447 - DNA, 41 bp, Homo sapiens; identical to SEQ ID NO: 1852

SEQ ID NO: 4448 - DNA, 41 bp, Homo sapiens; identical to SEQ ID NO: 1853
  misc_feature (21)..(21): t is present or absent.

SEQ ID NO: 4449 - DNA, 42 bp, Homo sapiens; identical to SEQ ID NO: 1854
  misc_feature (21)..(22): gt is present or absent.

SEQ ID NO: 4450 - DNA, 40 bp, Homo sapiens; identical to SEQ ID NO: 1855

SEQ ID NO: 4451 - DNA, 41 bp, Homo sapiens; identical to SEQ ID NO: 1856

SEQ ID NO: 4452 - DNA, 41 bp, Homo sapiens; identical to SEQ ID NO: 1857
  misc_feature (21)..(21): a is present or absent.

SEQ ID NO: 4453 - DNA, 41 bp, Homo sapiens; identical to SEQ ID NO: 1858
  misc_feature (21)..(21): a is present or absent.

SEQ ID NO: 4454 - DNA, 41 bp, Homo sapiens; identical to SEQ ID NO: 1859

SEQ ID NO: 4455 - DNA, 41 bp, Homo sapiens; identical to SEQ ID NO: 1860

SEQ ID NO: 4456 - DNA, 41 bp, Homo sapiens; identical to SEQ ID NO: 1861

SEQ ID NO: 4457 - DNA, 41 bp, Homo sapiens; identical to SEQ ID NO: 1862
  misc_feature (21)..(21): t is present or absent.

SEQ ID NO: 4458 - DNA, 41 bp, Homo sapiens; identical to SEQ ID NO: 1863

SEQ ID NO: 4459 - DNA, 41 bp, Homo sapiens; identical to SEQ ID NO: 1864

SEQ ID NO: 4460 - DNA, 42 bp, Homo sapiens
  misc_feature (21)..(22): at is present or absent.
atacatatatatgcacacacataaatatgtatatatacacat

SEQ ID NO: 4461 - DNA, 41 bp, Homo sapiens; identical to SEQ ID NO: 1866

SEQ ID NO: 4462 - DNA, 41 bp, Homo sapiens; identical to SEQ ID NO: 1867

SEQ ID NO: 4463 - DNA, 41 bp, Homo sapiens; identical to SEQ ID NO: 1868

SEQ ID NO: 4464 - DNA, 41 bp, Homo sapiens; identical to SEQ ID NO: 1869

SEQ ID NO: 4465 - DNA, 41 bp, Homo sapiens; identical to SEQ ID NO: 1870

SEQ ID NO: 4466 - DNA, 41 bp, Homo sapiens; identical to SEQ ID NO: 1871
  misc_feature (21)..(21): a is present or absent.

SEQ ID NO: 4467 - DNA, 41 bp, Homo sapiens; identical to SEQ ID NO: 1872

SEQ ID NO: 4468 - DNA, 41 bp, Homo sapiens; identical to SEQ ID NO: 1873

SEQ ID NO: 4469 - DNA, 41 bp, Homo sapiens; identical to SEQ ID NO: 1874
  misc_feature (21)..(21): t is present or absent.

SEQ ID NO: 4470 - DNA, 41 bp, Homo sapiens; identical to SEQ ID NO: 1875

SEQ ID NO: 4471 - DNA, 41 bp, Homo sapiens; identical to SEQ ID NO: 1876

SEQ ID NO: 4472 - DNA, 42 bp, Homo sapiens; identical to SEQ ID NO: 1877
  misc_feature (21)..(22): at is present or absent.

SEQ ID NO: 4473 - DNA, 41 bp, Homo sapiens; identical to SEQ ID NO: 1878
  misc_feature (21)..(21): a is present or absent.

SEQ ID NO: 4474 - DNA, 54 bp, Homo sapiens; identical to SEQ ID NO: 1879
  misc_feature (33)..(34): t is present or absent.

SEQ ID NO: 4475 - DNA, 41 bp, Homo sapiens; identical to SEQ ID NO: 1880

SEQ ID NO: 4476 - DNA, 41 bp, Homo sapiens; identical to SEQ ID NO: 1881

SEQ ID NO: 4477 - DNA, 41 bp, Homo sapiens; identical to SEQ ID NO: 1882
  misc_feature (21)..(21): t is present or absent.

SEQ ID NO: 4478 - DNA, 41 bp, Homo sapiens; identical to SEQ ID NO: 1883

SEQ ID NO: 4479 - DNA, 43 bp, Homo sapiens; identical to SEQ ID NO: 1884
  misc_feature (21)..(23): cac is present or absent.

SEQ ID NO: 4480 - DNA, 41 bp, Homo sapiens; identical to SEQ ID NO: 1885

SEQ ID NO: 4481 - DNA, 41 bp, Homo sapiens; identical to SEQ ID NO: 1886

SEQ ID NO: 4482 - DNA, 41 bp, Homo sapiens; identical to SEQ ID NO: 1887

SEQ ID NO: 4483 - DNA, 41 bp, Homo sapiens; identical to SEQ ID NO: 1888

SEQ ID NO: 4484 - DNA, 41 bp, Homo sapiens; identical to SEQ ID NO: 1889

SEQ ID NO: 4485 - DNA, 41 bp, Homo sapiens; identical to SEQ ID NO: 1890

SEQ ID NO: 4486 - DNA, 43 bp, Homo sapiens; identical to SEQ ID NO: 1891
  misc_feature (21)..(23): cca is present or absent.

SEQ ID NO: 4487 - DNA, 40 bp, Homo sapiens; identical to SEQ ID NO: 1892

SEQ ID NO: 4488 - DNA, 41 bp, Homo sapiens; identical to SEQ ID NO: 1893

SEQ ID NO: 4489 - DNA, 41 bp, Homo sapiens; identical to SEQ ID NO: 1894

SEQ ID NO: 4490 - DNA, 41 bp, Homo sapiens; identical to SEQ ID NO: 1895

SEQ ID NO: 4491 - DNA, 41 bp, Homo sapiens; identical to SEQ ID NO: 1896

SEQ ID NO: 4492 - DNA, 41 bp, Homo sapiens; identical to SEQ ID NO: 1897

SEQ ID NO: 4493 - DNA, 41 bp, Homo sapiens; identical to SEQ ID NO: 1898

SEQ ID NO: 4494 - DNA, 41 bp, Homo sapiens; identical to SEQ ID NO: 1899

SEQ ID NO: 4495 - DNA, 41 bp, Homo sapiens; identical to SEQ ID NO: 1900

SEQ ID NO: 4496 - DNA, 41 bp, Homo sapiens; identical to SEQ ID NO: 1901

SEQ ID NO: 4497 - DNA, 41 bp, Homo sapiens; identical to SEQ ID NO: 1902

SEQ ID NO: 4498 - DNA, 41 bp, Homo sapiens; identical to SEQ ID NO: 1903

SEQ ID NO: 4499 - DNA, 41 bp, Homo sapiens; identical to SEQ ID NO: 1904

SEQ ID NO: 4500 - DNA, 41 bp, Homo sapiens; identical to SEQ ID NO: 1905

SEQ ID NO: 4501 - DNA, 41 bp, Homo sapiens; identical to SEQ ID NO: 1906

SEQ ID NO: 4502 - DNA, 41 bp, Homo sapiens; identical to SEQ ID NO: 1907

SEQ ID NO: 4503 - DNA, 41 bp, Homo sapiens; identical to SEQ ID NO: 1908

SEQ ID NO: 4504 - DNA, 41 bp, Homo sapiens; identical to SEQ ID NO: 1909

SEQ ID NO: 4505 - DNA, 41 bp, Homo sapiens; identical to SEQ ID NO: 1910

SEQ ID NO: 4506 - DNA, 41 bp, Homo sapiens; identical to SEQ ID NO: 1911

SEQ ID NO: 4507 - DNA, 41 bp, Homo sapiens; identical to SEQ ID NO: 1912

SEQ ID NO: 4508 - DNA, 41 bp, Homo sapiens; identical to SEQ ID NO: 1913

SEQ ID NO: 4509 - DNA, 41 bp, Homo sapiens; identical to SEQ ID NO: 1914

SEQ ID NO: 4510 - DNA, 41 bp, Homo sapiens; identical to SEQ ID NO: 1915

SEQ ID NO: 4511 - DNA, 41 bp, Homo sapiens; identical to SEQ ID NO: 1916

SEQ ID NO: 4512 - DNA, 41 bp, Homo sapiens; identical to SEQ ID NO: 1917

SEQ ID NO: 4513 - DNA, 41 bp, Homo sapiens; identical to SEQ ID NO: 1918

SEQ ID NO: 4514 - DNA, 41 bp, Homo sapiens; identical to SEQ ID NO: 1919
  misc_feature (21)..(21): t is present or absent.

SEQ ID NO: 4515 - DNA, 41 bp, Homo sapiens; identical to SEQ ID NO: 1920

SEQ ID NO: 4516 - DNA, 41 bp, Homo sapiens; identical to SEQ ID NO: 1921

SEQ ID NO: 4517 - DNA, 41 bp, Homo sapiens; identical to SEQ ID NO: 1922

SEQ ID NO: 4518 - DNA, 41 bp, Homo sapiens; identical to SEQ ID NO: 1923

SEQ ID NO: 4519 - DNA, 41 bp, Homo sapiens; identical to SEQ ID NO: 1924

SEQ ID NO: 4520 - DNA, 41 bp, Homo sapiens; identical to SEQ ID NO: 1925

SEQ ID NO: 4521 - DNA, 41 bp, Homo sapiens; identical to SEQ ID NO: 1926

SEQ ID NO: 4522 - DNA, 41 bp, Homo sapiens; identical to SEQ ID NO: 1927

SEQ ID NO: 4523 - DNA, 41 bp, Homo sapiens; identical to SEQ ID NO: 1928

SEQ ID NO: 4524 - DNA, 41 bp, Homo sapiens; identical to SEQ ID NO: 1929

SEQ ID NO: 4525 - DNA, 41 bp, Homo sapiens; identical to SEQ ID NO: 1930

SEQ ID NO: 4526 - DNA, 41 bp, Homo sapiens; identical to SEQ ID NO: 1931

SEQ ID NO: 4527 - DNA, 41 bp, Homo sapiens; identical to SEQ ID NO: 1932

SEQ ID NO: 4528 - DNA, 41 bp, Homo sapiens; identical to SEQ ID NO: 1933

SEQ ID NO: 4529 - DNA, 41 bp, Homo sapiens; identical to SEQ ID NO: 1934

SEQ ID NO: 4530 - DNA, 41 bp, Homo sapiens; identical to SEQ ID NO: 1935

SEQ ID NO: 4531 - DNA, 41 bp, Homo sapiens; identical to SEQ ID NO: 1936

SEQ ID NO: 4532 - DNA, 41 bp, Homo sapiens; identical to SEQ ID NO: 1937

SEQ ID NO: 4533 - DNA, 41 bp, Homo sapiens; identical to SEQ ID NO: 1938

SEQ ID NO: 4534 - DNA, 41 bp, Homo sapiens; identical to SEQ ID NO: 1939

SEQ ID NO: 4535 - DNA, 41 bp, Homo sapiens; identical to SEQ ID NO: 1940

SEQ ID NO: 4536 - DNA, 41 bp, Homo sapiens; identical to SEQ ID NO: 1941

SEQ ID NO: 4537 - DNA, 41 bp, Homo sapiens; identical to SEQ ID NO: 1942

SEQ ID NO: 4538 - DNA, 41 bp, Homo sapiens; identical to SEQ ID NO: 1943

SEQ ID NO: 4539 - DNA, 41 bp, Homo sapiens; identical to SEQ ID NO: 1944

SEQ ID NO: 4540 - DNA, 41 bp, Homo sapiens; identical to SEQ ID NO: 1945

SEQ ID NO: 4541 - DNA, 41 bp, Homo sapiens; identical to SEQ ID NO: 1946

SEQ ID NO: 4542 - DNA, 41 bp, Homo sapiens; identical to SEQ ID NO: 1947

SEQ ID NO: 4543 - DNA, 41 bp, Homo sapiens; identical to SEQ ID NO: 1948

SEQ ID NO: 4544 - DNA, 41 bp, Homo sapiens; identical to SEQ ID NO: 1949
  misc_feature (21)..(21): c is present or absent.

SEQ ID NO: 4545 - DNA, 41 bp, Homo sapiens; identical to SEQ ID NO: 1950

SEQ ID NO: 4546 - DNA, 41 bp, Homo sapiens; identical to SEQ ID NO: 1951

SEQ ID NO: 4547 - DNA, 41 bp, Homo sapiens; identical to SEQ ID NO: 1952

SEQ ID NO: 4548 - DNA, 41 bp, Homo sapiens; identical to SEQ ID NO: 1953

SEQ ID NO: 4549 - DNA, 41 bp, Homo sapiens; identical to SEQ ID NO: 1954

SEQ ID NO: 4550 - DNA, 41 bp, Homo sapiens; identical to SEQ ID NO: 1955

SEQ ID NO: 4551 - DNA, 41 bp, Homo sapiens; identical to SEQ ID NO: 1956

SEQ ID NO: 4552 - DNA, 44 bp, Homo sapiens; identical to SEQ ID NO: 1957
  misc_feature (21)..(24): aaaa is present or absent.

SEQ ID NO: 4553 - DNA, 41 bp, Homo sapiens; identical to SEQ ID NO: 1958

SEQ ID NO: 4554 - DNA, 41 bp, Homo sapiens; identical to SEQ ID NO: 1959

SEQ ID NO: 4555 - DNA, 41 bp, Homo sapiens; identical to SEQ ID NO: 1960

SEQ ID NO: 4556 - DNA, 41 bp, Homo sapiens; identical to SEQ ID NO: 1961

SEQ ID NO: 4557 - DNA, 41 bp, Homo sapiens; identical to SEQ ID NO: 1962

SEQ ID NO: 4558 - DNA, 41 bp, Homo sapiens; identical to SEQ ID NO: 1963

SEQ ID NO: 4559 - DNA, 41 bp, Homo sapiens; identical to SEQ ID NO: 1964

SEQ ID NO: 4560 - DNA, 41 bp, Homo sapiens; identical to SEQ ID NO: 1965

SEQ ID NO: 4561 - DNA, 41 bp, Homo sapiens; identical to SEQ ID NO: 1966

SEQ ID NO: 4562 - DNA, 41 bp, Homo sapiens; identical to SEQ ID NO: 1967

SEQ ID NO: 4563 - DNA, 41 bp, Homo sapiens; identical to SEQ ID NO: 1968

SEQ ID NO: 4564 - DNA, 41 bp, Homo sapiens; identical to SEQ ID NO: 1969

SEQ ID NO: 4565 - DNA, 41 bp, Homo sapiens; identical to SEQ ID NO: 1970
  misc_feature (21)..(21): c is present or absent.

SEQ ID NO: 4566 - DNA, 41 bp, Homo sapiens; identical to SEQ ID NO: 1971

SEQ ID NO: 4567 - DNA, 41 bp, Homo sapiens; identical to SEQ ID NO: 1972

SEQ ID NO: 4568 - DNA, 41 bp, Homo sapiens; identical to SEQ ID NO: 1973

SEQ ID NO: 4569 - DNA, 41 bp, Homo sapiens; identical to SEQ ID NO: 1974

SEQ ID NO: 4570 - DNA, 41 bp, Homo sapiens; identical to SEQ ID NO: 1975

SEQ ID NO: 4571 - DNA, 41 bp, Homo sapiens; identical to SEQ ID NO: 1976

SEQ ID NO: 4572 - DNA, 41 bp, Homo sapiens; identical to SEQ ID NO: 1977

SEQ ID NO: 4573 - DNA, 41 bp, Homo sapiens; identical to SEQ ID NO: 1978

SEQ ID NO: 4574 - DNA, 41 bp, Homo sapiens; identical to SEQ ID NO: 1979

SEQ ID NO: 4575 - DNA, 49 bp, Homo sapiens; identical to SEQ ID NO: 1980
  misc_feature (29)..(29): t is present or absent.

SEQ ID NO: 4576 - DNA, 41 bp, Homo sapiens; identical to SEQ ID NO: 1981
  misc_feature (21)..(21): a is present or absent.

SEQ ID NO: 4577 - DNA, 41 bp, Homo sapiens; identical to SEQ ID NO: 1982

SEQ ID NO: 4578 - DNA, 41 bp, Homo sapiens; identical to SEQ ID NO: 1983

SEQ ID NO: 4579 - DNA, 41 bp, Homo sapiens; identical to SEQ ID NO: 1984

SEQ ID NO: 4580 - DNA, 41 bp, Homo sapiens; identical to SEQ ID NO: 1985

SEQ ID NO: 4581 - DNA, 41 bp, Homo sapiens; identical to SEQ ID NO: 1986

SEQ ID NO: 4582 - DNA, 41 bp, Homo sapiens; identical to SEQ ID NO: 1987

SEQ ID NO: 4583 - DNA, 41 bp, Homo sapiens; identical to SEQ ID NO: 1988

SEQ ID NO: 4584 - DNA, 41 bp, Homo sapiens; identical to SEQ ID NO: 1989

SEQ ID NO: 4585 - DNA, 41 bp, Homo sapiens; identical to SEQ ID NO: 1990

SEQ ID NO: 4586 - DNA, 41 bp, Homo sapiens; identical to SEQ ID NO: 1991

SEQ ID NO: 4587 - DNA, 41 bp, Homo sapiens; identical to SEQ ID NO: 1992

SEQ ID NO: 4588 - DNA, 44 bp, Homo sapiens; identical to SEQ ID NO: 1993
  misc_feature (21)..(24): taac is present or absent.

SEQ ID NO: 4589 - DNA, 46 bp, Homo sapiens; identical to SEQ ID NO: 1994
  misc_feature (21)..(26): ctcttt is present or absent.

SEQ ID NO: 4590 - DNA, 42 bp, Homo sapiens; identical to SEQ ID NO: 1995
  misc_feature (21)..(22): ct is present or absent.

SEQ ID NO: 4591 - DNA, 40 bp, Homo sapiens; identical to SEQ ID NO: 1996

SEQ ID NO: 4592 - DNA, 41 bp, Homo sapiens; identical to SEQ ID NO: 1997

SEQ ID NO: 4593 - DNA, 41 bp, Homo sapiens; identical to SEQ ID NO: 1998

SEQ ID NO: 4594 - DNA, 41 bp, Homo sapiens; identical to SEQ ID NO: 1999

SEQ ID NO: 4595 - DNA, 41 bp, Homo sapiens; identical to SEQ ID NO: 2000

SEQ ID NO: 4596 - DNA, 41 bp, Homo sapiens; identical to SEQ ID NO: 2001

SEQ ID NO: 4597 - DNA, 41 bp, Homo sapiens; identical to SEQ ID NO: 2002
  misc_feature (21)..(21): a is present or absent.

SEQ ID NO: 4598 - DNA, 41 bp, Homo sapiens; identical to SEQ ID NO: 2003

SEQ ID NO: 4599 - DNA, 41 bp, Homo sapiens; identical to SEQ ID NO: 2004

SEQ ID NO: 4600 - DNA, 41 bp, Homo sapiens; identical to SEQ ID NO: 2005
  misc_feature (21)..(21): t is present or absent.

SEQ ID NO: 4601 - DNA, 41 bp, Homo sapiens; identical to SEQ ID NO: 2006

SEQ ID NO: 4602 - DNA, 41 bp, Homo sapiens; identical to SEQ ID NO: 2007

SEQ ID NO: 4603 - DNA, 41 bp, Homo sapiens; identical to SEQ ID NO: 2008
  misc_feature (21)..(21): g is present or absent.

SEQ ID NO: 4604 - DNA, 41 bp, Homo sapiens; identical to SEQ ID NO: 2009

SEQ ID NO: 4605 - DNA, 41 bp, Homo sapiens; identical to SEQ ID NO: 2010

SEQ ID NO: 4606 - DNA, 48 bp, Homo sapiens; identical to SEQ ID NO: 2011
  misc_feature (21)..(28): aattagaa is present or absent.

SEQ ID NO: 4607 - DNA, 47 bp, Homo sapiens; identical to SEQ ID NO: 2012
  misc_feature (21)..(23): n is t.
  misc_feature (24)..(24): n is a or t.
  misc_feature (25)..(26): n is a.
  misc_feature (27)..(27): a is present or absent.

SEQ ID NO: 4608 - DNA, 41 bp, Homo sapiens; identical to SEQ ID NO: 2013

SEQ ID NO: 4609 - DNA, 41 bp, Homo sapiens; identical to SEQ ID NO: 2014

SEQ ID NO: 4610 - DNA, 41 bp, Homo sapiens; identical to SEQ ID NO: 2015
  misc_feature (21)..(21): t is present or absent.

SEQ ID NO: 4611 - DNA, 41 bp, Homo sapiens; identical to SEQ ID NO: 2016

SEQ ID NO: 4612 - DNA, 41 bp, Homo sapiens; identical to SEQ ID NO: 2017

SEQ ID NO: 4613 - DNA, 41 bp, Homo sapiens; identical to SEQ ID NO: 2018

SEQ ID NO: 4614 - DNA, 41 bp, Homo sapiens; identical to SEQ ID NO: 2019

SEQ ID NO: 4615 - DNA, 41 bp, Homo sapiens; identical to SEQ ID NO: 2020
  misc_feature (21)..(21): t is present or absent.

SEQ ID NO: 4616 - DNA, 41 bp, Homo sapiens; identical to SEQ ID NO: 2021

SEQ ID NO: 4617 - DNA, 41 bp, Homo sapiens
agtcccagggctagggcacargcaccctcctgcctaactcg

SEQ ID NO: 4618 - DNA, 41 bp, Homo sapiens
acaatccttccagccacctgyctcaactgctgccccaggca

SEQ ID NO: 4619 - DNA, 41 bp, Homo sapiens
gggcacaatggcatccatccyccgaaggcctgtgtgtgctc

SEQ ID NO: 4620 - DNA, 41 bp, Homo sapiens
gagacctggccccacccaatygtaacctctggctctcggcc

SEQ ID NO: 4621 - DNA, 41 bp, Homo sapiens
aagcctctctgtgtctgtcaycccccgcaggtggagctggc

SEQ ID NO: 4622 - DNA, 41 bp, Homo sapiens
agaagtttcccttgctttccrtcaagcttggctctgctcga

SEQ ID NO: 4623 - DNA, 41 bp, Homo sapiens
gcgagacagcacctgcagccrcttcgctccatggctgccat

SEQ ID NO: 4624 - DNA, 41 bp, Homo sapiens
ggtccttcacaggacattccyaccacttcagccacacccca

SEQ ID NO: 4625 - DNA, 41 bp, Homo sapiens
aatggcctgcgtgctggcctygggcattgggagcctctcaa

SEQ ID NO: 4626 - DNA, 41 bp, Homo sapiens
atctgtgtggggtgtgtgcaygggcggcgatgtgagcgtgt

SEQ ID NO: 4627 - DNA, 41 bp, Homo sapiens
  misc_feature (21)..(21): c is present or absent.
ggcgtcagcggctgttgcccctgcaggtggaggaaggcatg

SEQ ID NO: 4628 - DNA, 41 bp, Homo sapiens
acatccctttcttgcctggcrgatttgaactctttgagtca

SEQ ID NO: 4629 - DNA, 41 bp, Homo sapiens
tacagaatcacctttgtcaarccttaagcctttattgaaag

SEQ ID NO: 4630 - DNA, 41 bp, Homo sapiens
gtagccgccgccgccgccgcygccgcgtcccctcgccggct

SEQ ID NO: 4631 - DNA, 41 bp, Homo sapiens
atactttgccatttgagataycagtttggagttgatagctg

SEQ ID NO: 4632 - DNA, 41 bp, Homo sapiens
ctttggacctatactagtttycttaggcattgtgcttagaa

SEQ ID NO: 4633 - DNA, 41 bp, Homo sapiens
accacagtggtcttttttttrtatttaaaaaaattattggg

SEQ ID NO: 4634 - DNA, 41 bp, Homo sapiens
cagaactcacttccttattcrgtttttagataacattgttt

SEQ ID NO: 4635 - DNA, 41 bp, Homo sapiens
tggttctttaattttatgatrtgtttgttatagctatctta

SEQ ID NO: 4636 - DNA, 41 bp, Homo sapiens
tctcttgtttctgaagtattwtttcattttattttatgtga

SEQ ID NO: 4637 - DNA, 41 bp, Homo sapiens
gtgaaatgctagggtactgcyatacagctaccctaaatggt

SEQ ID NO: 4638 - DNA, 41 bp, Homo sapiens
aaagcatttcaaagaatcacrttgagcatgtttattagaag

SEQ ID NO: 4639 - DNA, 41 bp, Homo sapiens
gacaacagaatagctaatccrgaccagctgcttacacaaga

SEQ ID NO: 4640 - DNA, 41 bp, Homo sapiens
aaatatttaatgcttttatargaaaattagagttgttgtaa

SEQ ID NO: 4641 - DNA, 41 bp, Homo sapiens
ggtcacagttgacctagatayacagttttgagacaaaagaa

SEQ ID NO: 4642 - DNA, 41 bp, Homo sapiens
aatcttgaatacttactagcmcatatattgtgctagatagt

SEQ ID NO: 4643 - DNA, 41 bp, Homo sapiens
tcatcttcttccataggcttrggtgtggagaggagatagaa

SEQ ID NO: 4644 - DNA, 41 bp, Homo sapiens
tctgttgagttggggatcctrtggaaacctcttccttcatc

SEQ ID NO: 4645 - DNA, 41 bp, Homo sapiens
gaaaagtgaatgctgagtagkttagccaggcttgatttaga

SEQ ID NO: 4646 - DNA, 41 bp, Homo sapiens
ttctaaaagttcagagaaacwctgtagctcattattcctgg

SEQ ID NO: 4647 - DNA, 41 bp, Homo sapiens
ctcaaaagaaaaaaaaaaaamaaaaaacacatgatccataa

SEQ ID NO: 4648 - DNA, 41 bp, Homo sapiens
cttaaggtttgtgttttactytgagcaattagtatttccca

SEQ ID NO: 4649 - DNA, 41 bp, Homo sapiens
atcataaacagagaaataatrtcttaaatgagctctgaaaa

SEQ ID NO: 4650 - DNA, 41 bp, Homo sapiens
ctagaaatcaaaggcatttaraatatagccaagcctttatg

SEQ ID NO: 4651 - DNA, 41 bp, Homo sapiens
agtagcaaaataatcatcacrccagtgatcatgtgaaggag

SEQ ID NO: 4652 - DNA, 54 bp, Homo sapiens
  misc_feature (32)..(34): t is present or absent.
taactttcttgtagttagcgttttttttttttttaactgttttactttttaggg

SEQ ID NO: 4653 - DNA, 41 bp, Homo sapiens
  misc_feature (21)..(21): t is present or absent.
gttttttggcattttttttttaaccttcagtccaggttttc

SEQ ID NO: 4654 - DNA, 53 bp, Homo sapiens
  misc_feature (31)..(33): t is present or absent.
ttggtgtaaaacctgtagtgtttttttttttttaacaaatgcaaatatagtgt

SEQ ID NO: 4655 - DNA, 41 bp, Homo sapiens
  misc_feature (21)..(21): t is present or absent.
gggaatggggggtgtatctattacaactttccatgtaattt

SEQ ID NO: 4656 - DNA, 40 bp, Homo sapiens
gggaatggggggtgtatctatacaactttccatgtaattt

SEQ ID NO: 4657 - DNA, 41 bp, Homo sapiens
  misc_feature (21)..(21): t is present or absent.
cagatttacttttttttttttaatcttgaatacttactagc

SEQ ID NO: 4658 - DNA, 42 bp, Homo sapiens
  misc_feature (21)..(22): ta is present or absent.
tgaaacataataaagcacactagttatcattaatactttatg

SEQ ID NO: 4659 - DNA, 40 bp, Homo sapiens
tgaaacataataaagcacacgttatcattaatactttatg

SEQ ID NO: 4660 - DNA, 55 bp, Homo sapiens
  misc_feature (34)..(35): t is present or absent.
ttaattacttcacagactgatttttttttttttttcaggttcgatctggggctaa

SEQ ID NO: 4661 - DNA, 41 bp, Homo sapiens
  misc_feature (21)..(21): c is present or absent.
gttcctcaggtaagacctagcttgagttatctttgatctaa

SEQ ID NO: 4662 - DNA, 60 bp, Homo sapiens
  misc_feature (38)..(40): a is present or absent.
gcaagactctgtctcaaaagaaaaaaaaaaaaaaaaaaaacacatgatccataatagagg

SEQ ID NO: 4663 - DNA, 53 bp, Homo sapiens
  misc_feature (32)..(33): t is present or absent.
ttaatccatttttgtaaatctttttttttttttaccttaaattagcaactatc

SEQ ID NO: 4664 - DNA, 49 bp, Homo sapiens
  misc_feature (29)..(29): t is present or absent.
taaaataaagttgagcttagtttttttttaaaaaaaaaacaaagcaaca

SEQ ID NO: 4665 - DNA, 51 bp, Homo sapiens
  misc_feature (31)..(31): a is present or absent.
gttgagcttagtttttttttaaaaaaaaaaacaaagcaacaaattaactag

SEQ ID NO: 4666 - DNA, 59 bp, Homo sapiens
  misc_feature (37)..(39): a is present or absent.
acttattttctgttcagattaaaaaaaaaaaaaaaaaaactcagatatcctatacaacc

SEQ ID NO: 4667 - DNA, 41 bp, Homo sapiens
tggcattctttttttgaaaaraagaacctcaggtgcacaaa

SEQ ID NO: 4668 - DNA, 41 bp, Homo sapiens
cttctcagttcttgacacccygtgggccaatgcaaggctcc

SEQ ID NO: 4669 - DNA, 41 bp, Homo sapiens
ttaagcacgttgatcttgctrttggcccacgtgggactgat

SEQ ID NO: 4670 - DNA, 41 bp, Homo sapiens
cctacccctcattcagtaggrgggctaccacctgctcactc

SEQ ID NO: 4671 - DNA, 41 bp, Homo sapiens
gacaggggctacctgagaggkaacaggagtcagggctgagg

SEQ ID NO: 4672 - DNA, 41 bp, Homo sapiens
tagtcttagtggcctagcgtrgggcctgaaattgtcaaatg

SEQ ID NO: 4673 - DNA, 41 bp, Homo sapiens
gaaattgtcaaatgaatgaaygcctcatcctcttgctggtg

SEQ ID NO: 4674 - DNA, 41 bp, Homo sapiens
tctatggagacctgagtcccrcagagcttagcaccctggtc

SEQ ID NO: 4675 - DNA, 41 bp, Homo sapiens
atcagctgcttcacccagctmatcgacctgtccacgacgct

SEQ ID NO: 4676 - DNA, 41 bp, Homo sapiens
gcgagatcctgggcgagagcragtggggcttggacacgtga

SEQ ID NO: 4677 - DNA, 41 bp, Homo sapiens
tggattgggcccactactcayagcagctcctgaggcaggta

SEQ ID NO: 4678 - DNA, 41 bp, Homo sapiens
acgcgtatgtcaaacacccarggtcggattctggggcccct

SEQ ID NO: 4679 - DNA, 41 bp, Homo sapiens
cctctgctcctctggcccatscttctccctgaggcagggct

SEQ ID NO: 4680 - DNA, 41 bp, Homo sapiens
gtgggaggagaagcagcggcrgcagagggcagggctttgat

SEQ ID NO: 4681 - DNA, 41 bp, Homo sapiens
ggcctgaggaggagaaagaayccaaaggctcagcctggcca

SEQ ID NO: 4682 - DNA, 41 bp, Homo sapiens
gcccaggtctaggtttctgtrggggacactgaatctcccag

SEQ ID NO: 4683 - DNA, 41 bp, Homo sapiens
gcaataatcattggctagagrtattgtgatatgatgtcatt

SEQ ID NO: 4684 - DNA, 41 bp, Homo sapiens
caccaaatattggtgagctgyctggatttgggagatgcagt

SEQ ID NO: 4685 - DNA, 41 bp, Homo sapiens
acttggggtccggtgtgaggmtcctgcactcggtttctgtg

SEQ ID NO: 4686 - DNA, 41 bp, Homo sapiens
actcggtttctgtgatggtgwgtgcaggggagtcacaagtt

SEQ ID NO: 4687 - DNA, 41 bp, Homo sapiens
ggtcccaacgggtttctagayccctccagagaagcctttgg

SEQ ID NO: 4688 - DNA, 41 bp, Homo sapiens
ctgggtacaggttttgttccrgttggtctgctattgagtat

SEQ ID NO: 4689 - DNA, 41 bp, Homo sapiens
ttaaaatgagttgtttttctsctaaagcctttagggagttg

SEQ ID NO: 4690 - DNA, 41 bp, Homo sapiens
tttgtcacttccttcgtctcyggctctacttccctgggggt

SEQ ID NO: 4691 - DNA, 41 bp, Homo sapiens
gttccttggaggaaacgtggrgtacacagtggttccagtta

SEQ ID NO: 4692 - DNA, 41 bp, Homo sapiens
acagtgaagcacaaggcagcygaagacacagcaggcaggtc

SEQ ID NO: 4693 - DNA, 41 bp, Homo sapiens
aggtcaggtctgtgtgcacaytggcaggctgcrtgcagacc

SEQ ID NO: 4694 - DNA, 41 bp, Homo sapiens
ggctgcrtgcagaccagcctyggcccaggtggagaagcaga

SEQ ID NO: 4695 - DNA, 41 bp, Homo sapiens
ctggacatgtgactcccctgyacccaccctcacaagcacca

SEQ ID NO: 4696 - DNA, 41 bp, Homo sapiens
cagggtgatagggagtccaaytggacacaggttcagtttgc

SEQ ID NO: 4697 - DNA, 41 bp, Homo sapiens
gggggtgaacagagggcagargcctgggcatcttcactcag

SEQ ID NO: 4698 - DNA, 41 bp, Homo sapiens
gaagggaagaagcagcagcargaaagaagccccctggccct

SEQ ID NO: 4699 - DNA, 41 bp, Homo sapiens
tgacccagggcaccctagagwggcgcccggctccgatcgct

SEQ ID NO: 4700 - DNA, 41 bp, Homo sapiens
gctgcccctgcccctccgccmgggccacctggagcctcggg

SEQ ID NO: 4701 - DNA, 41 bp, Homo sapiens
cagttactgtaagtgctgttyccaggggtggtcargaatct

SEQ ID NO: 4702 - DNA, 41 bp, Homo sapiens
gctgttyccaggggtggtcargaatctccctttctggtttt

SEQ ID NO: 4703 - DNA, 41 bp, Homo sapiens
gctaagcagagttaggccccrgctagtccttgaatgagaga

SEQ ID NO: 4704 - DNA, 41 bp, Homo sapiens
atgctggagcccctgagttcrgtgggcatacaaggggtggc

SEQ ID NO: 4705 - DNA, 41 bp, Homo sapiens
ctcgcatcacgcagttttcaygatcctattaattgggtgag

SEQ ID NO: 4706 - DNA, 41 bp, Homo sapiens
cctgggcttcagcaggggccycacacctgcaatgggtgyct

SEQ ID NO: 4707 - DNA, 41 bp, Homo sapiens
ccycacacctgcaatgggtgyctggggagagggtgcagatg

SEQ ID NO: 4708 - DNA, 41 bp, Homo sapiens; identical to SEQ ID NO: 2354

SEQ ID NO: 4709 - DNA, 41 bp, Homo sapiens; identical to SEQ ID NO: 2355

SEQ ID NO: 4710 - DNA, 41 bp, Homo sapiens; identical to SEQ ID NO: 2356

SEQ ID NO: 4711 - DNA, 41 bp, Homo sapiens; identical to SEQ ID NO: 2357

SEQ ID NO: 4712 - DNA, 41 bp, Homo sapiens; identical to SEQ ID NO: 2358

SEQ ID NO: 4713 - DNA, 41 bp, Homo sapiens
gaggggttgacagacaggatrtgtctgstgtgttccagctg

SEQ ID NO: 4714 - DNA, 41 bp, Homo sapiens
tgacagacaggatrtgtctgstgtgttccagctgctggttt

SEQ ID NO: 4715 - DNA, 41 bp, Homo sapiens; identical to SEQ ID NO: 2361

SEQ ID NO: 4716 - DNA, 41 bp, Homo sapiens; identical to SEQ ID NO: 2362

SEQ ID NO: 4717 - DNA, 41 bp, Homo sapiens; identical to SEQ ID NO: 2363

SEQ ID NO: 4718 - DNA, 41 bp, Homo sapiens; identical to SEQ ID NO: 2364

SEQ ID NO: 4719 - DNA, 41 bp, Homo sapiens; identical to SEQ ID NO: 2365

SEQ ID NO: 4720 - DNA, 41 bp, Homo sapiens; identical to SEQ ID NO: 2366

SEQ ID NO: 4721 - DNA, 41 bp, Homo sapiens; identical to SEQ ID NO: 2372

SEQ ID NO: 4722 - DNA, 41 bp, Homo sapiens; identical to SEQ ID NO: 2374

SEQ ID NO: 4723 - DNA, 41 bp, Homo sapiens; identical to SEQ ID NO: 2375

SEQ ID NO: 4724 - DNA, 41 bp, Homo sapiens; identical to SEQ ID NO: 2378

SEQ ID NO: 4725 - DNA, 41 bp, Homo sapiens
acatggccggcttcccttctycctcrgaatggcctggaatt

SEQ ID NO: 4726 - DNA, 41 bp, Homo sapiens
gccggcttcccttctycctcrgaatggcctggaattcgatc

SEQ ID NO: 4727 - DNA, 41 bp, Homo sapiens; identical to SEQ ID NO: 2381

SEQ ID NO: 4728 - DNA, 41 bp, Homo sapiens; identical to SEQ ID NO: 2382

SEQ ID NO: 4729 - DNA, 41 bp, Homo sapiens; identical to SEQ ID NO: 2383

SEQ ID NO: 4730 - DNA, 41 bp, Homo sapiens; identical to SEQ ID NO: 2386

SEQ ID NO: 4731 - DNA, 41 bp, Homo sapiens; identical to SEQ ID NO: 2388

SEQ ID NO: 4732 - DNA, 41 bp, Homo sapiens
tgaaaagaaaatggatgagtrgaamccaaaagagagaaaat

SEQ ID NO: 4733 - DNA, 41 bp, Homo sapiens
aagaaaatggatgagtrgaamccaaaagagagaaaatgtgg

SEQ ID NO: 4734 - DNA, 41 bp, Homo sapiens; identical to SEQ ID NO: 2395

SEQ ID NO: 4735 - DNA, 41 bp, Homo sapiens; identical to SEQ ID NO: 2396

SEQ ID NO: 4736 - DNA, 41 bp, Homo sapiens; identical to SEQ ID NO: 2398

SEQ ID NO: 4737 - DNA, 41 bp, Homo sapiens; identical to SEQ ID NO: 2399

SEQ ID NO: 4738 - DNA, 41 bp, Homo sapiens; identical to SEQ ID NO: 2400

SEQ ID NO: 4739 - DNA, 41 bp, Homo sapiens; identical to SEQ ID NO: 2401

SEQ ID NO: 4740 - DNA, 41 bp, Homo sapiens
cgcccgccgggaagccccagrggggctggagctacargtgg

SEQ ID NO: 4741 - DNA, 41 bp, Homo sapiens
ccagrggggctggagctacargtggccttgcaggttttttg

SEQ ID NO: 4742 - DNA, 41 bp, Homo sapiens; identical to SEQ ID NO: 2404

SEQ ID NO: 4743 - DNA, 41 bp, Homo sapiens; identical to SEQ ID NO: 2406

SEQ ID NO: 4744 - DNA, 41 bp, Homo sapiens; identical to SEQ ID NO: 2407

SEQ ID NO: 4745 - DNA, 41 bp, Homo sapiens; identical to SEQ ID NO: 2408

SEQ ID NO: 4746 - DNA, 41 bp, Homo sapiens; identical to SEQ ID NO: 2410

SEQ ID NO: 4747 - DNA, 41 bp, Homo sapiens; identical to SEQ ID NO: 2411

SEQ ID NO: 4748 - DNA, 41 bp, Homo sapiens; identical to SEQ ID NO: 2413

SEQ ID NO: 4749 - DNA, 41 bp, Homo sapiens
ctggaggagaagacaggatamagtctaagacgtgytgtcac

SEQ ID NO: 4750 - DNA, 41 bp, Homo sapiens
aggatamagtctaagacgtgytgtcacagagttcagggtcc

SEQ ID NO: 4751 - DNA, 41 bp, Homo sapiens
gcttccaaaggccgcatccgkgttgttctctgagcygagga

SEQ ID NO: 4752 - DNA, 41 bp, Homo sapiens
atccgkgttgttctctgagcygaggacggctttgcgaacgc

SEQ ID NO: 4753 - DNA, 41 bp, Homo sapiens; identical to SEQ ID NO: 2419

SEQ ID NO: 4754 - DNA, 41 bp, Homo sapiens; identical to SEQ ID NO: 2421

SEQ ID NO: 4755 - DNA, 41 bp, Homo sapiens; identical to SEQ ID NO: 2424

SEQ ID NO: 4756 - DNA, 41 bp, Homo sapiens; identical to SEQ ID NO: 2425

SEQ ID NO: 4757 - DNA, 41 bp, Homo sapiens; identical to SEQ ID NO: 2426

SEQ ID NO: 4758 - DNA, 41 bp, Homo sapiens
  misc_feature (21)..(21): g is present or absent.
ctccaccctgcacctccctggcctccttgatttccctcatc

SEQ ID NO: 4759 - DNA, 40 bp, Homo sapiens
ctccaccctgcacctccctgcctccttgatttccctcatc

SEQ ID NO: 4760 - DNA, 47 bp, Homo sapiens
  misc_feature (27)..(27): a is present or absent.
cagtttccagaatttgggggaaaaaaatcccataagctgtcatactt

SEQ ID NO: 4761 - DNA, 41 bp, Homo sapiens
  misc_feature (21)..(21): c is present or absent.
tgtcgagagctccccttgccctggttgatcctcagggttct

SEQ ID NO: 4762 - DNA, 40 bp, Homo sapiens
tgtcgagagctccccttgcctggttgatcctcagggttct

SEQ ID NO: 4763 - DNA, 49 bp, Homo sapiens
  misc_feature (21)..(29): tcctcaggg is present or absent.
agctccccttgcctggttgatcctcagggttctacttagaatgcctcga

SEQ ID NO: 4764 - DNA, 70 bp, Homo sapiens
  misc_feature (45)..(47): cgc is present or absent.
  misc_feature (48)..(50): cgc is present or absent.
cgcagctcaagcctcgtccccgccgccgccgccgccgccgccgccgccgcccccggggcatggcctgtct

SEQ ID NO: 4765 - DNA, 52 bp, Homo sapiens
  misc_feature (31)..(32): a is present or absent.
tcttgccttgagctcaagagaaaaaaaaaaaatagccaggtttctgcgcatg

SEQ ID NO: 4766 - DNA, 76 bp, Homo sapiens
  misc_feature (21)..(56): caccaggcagcagactctgatgaggaggggaggggg is present or absent.
ctgatgaggaggggagggggcaccaggcagcagactctgatgaggaggggagggggcaccaggcagcagactctga

SEQ ID NO: 4767 - DNA, 40 bp, Homo sapiens
ctgatgaggaggggagggggcaccaggcagcagactctga

SEQ ID NO: 4768 - DNA, 41 bp, Homo sapiens; identical to SEQ ID NO: 2429
  misc_feature (21)..(21): g is present or absent.

SEQ ID NO: 4769 - DNA, 40 bp, Homo sapiens; identical to SEQ ID NO: 2430

SEQ ID NO: 4770 - DNA, 41 bp, Homo sapiens; identical to SEQ ID NO: 2431

SEQ ID NO: 4771 - DNA, 41 bp, Homo sapiens; identical to SEQ ID NO: 2432

SEQ ID NO: 4772 - DNA, 41 bp, Homo sapiens; identical to SEQ ID NO: 2433

SEQ ID NO: 4773 - DNA, 41 bp, Homo sapiens; identical to SEQ ID NO: 2434

SEQ ID NO: 4774 - DNA, 41 bp, Homo sapiens; identical to SEQ ID NO: 2435

SEQ ID NO: 4775 - DNA, 41 bp, Homo sapiens
ctgaagaactctgcaggaaayraaaatagttccctgctttt

SEQ ID NO: 4776 - DNA, 41 bp, Homo sapiens
tgaagaactctgcaggaaayraaaatagttccctgctttta

SEQ ID NO: 4777 - DNA, 41 bp, Homo sapiens; identical to SEQ ID NO: 2438

SEQ ID NO: 4778 - DNA, 41 bp, Homo sapiens; identical to SEQ ID NO: 2439

SEQ ID NO: 4779 - DNA, 41 bp, Homo sapiens; identical to SEQ ID NO: 2440

SEQ ID NO: 4780 - DNA, 41 bp, Homo sapiens; identical to SEQ ID NO: 2441

SEQ ID NO: 4781 - DNA, 41 bp, Homo sapiens; identical to SEQ ID NO: 2442

SEQ ID NO: 4782 - DNA, 41 bp, Homo sapiens; identical to SEQ ID NO: 2443

SEQ ID NO: 4783 - DNA, 41 bp, Homo sapiens; identical to SEQ ID NO: 2445

SEQ ID NO: 4784 - DNA, 41 bp, Homo sapiens; identical to SEQ ID NO: 2446

SEQ ID NO: 4785 - DNA, 41 bp, Homo sapiens; identical to SEQ ID NO: 2447

SEQ ID NO: 4786 - DNA, 41 bp, Homo sapiens; identical to SEQ ID NO: 2448

SEQ ID NO: 4787 - DNA, 41 bp, Homo sapiens; identical to SEQ ID NO: 2449

SEQ ID NO: 4788 - DNA, 41 bp, Homo sapiens; identical to SEQ ID NO: 2450

SEQ ID NO: 4789 - DNA, 41 bp, Homo sapiens; identical to SEQ ID NO: 2451

SEQ ID NO: 4790 - DNA, 41 bp, Homo sapiens; identical to SEQ ID NO: 2452

SEQ ID NO: 4791 - DNA, 41 bp, Homo sapiens; identical to SEQ ID NO: 2454

SEQ ID NO: 4792 - DNA, 41 bp, Homo sapiens; identical to SEQ ID NO: 2455

SEQ ID NO: 4793 - DNA, 41 bp, Homo sapiens; identical to SEQ ID NO: 2458

SEQ ID NO: 4794 - DNA, 41 bp, Homo sapiens; identical to SEQ ID NO: 2459

SEQ ID NO: 4795 - DNA, 41 bp, Homo sapiens; identical to SEQ ID NO: 2460

SEQ ID NO: 4796 - DNA, 41 bp, Homo sapiens; identical to SEQ ID NO: 2461

SEQ ID NO: 4797 - DNA, 41 bp, Homo sapiens; identical to SEQ ID NO: 2462

SEQ ID NO: 4798 - DNA, 41 bp, Homo sapiens; identical to SEQ ID NO: 2463

SEQ ID NO: 4799 - DNA, 41 bp, Homo sapiens; identical to SEQ ID NO: 2464

SEQ ID NO: 4800 - DNA, 41 bp, Homo sapiens; identical to SEQ ID NO: 2465

SEQ ID NO: 4801 - DNA, 41 bp, Homo sapiens; identical to SEQ ID NO: 2466

SEQ ID NO: 4802 - DNA, 41 bp, Homo sapiens; identical to SEQ ID NO: 2467

SEQ ID NO: 4803 - DNA, 41 bp, Homo sapiens; identical to SEQ ID NO: 2468

SEQ ID NO: 4804 - DNA, 41 bp, Homo sapiens; identical to SEQ ID NO: 2469

SEQ ID NO: 4805 - DNA, 41 bp, Homo sapiens; identical to SEQ ID NO: 2470

SEQ ID NO: 4806 - DNA, 41 bp, Homo sapiens; identical to SEQ ID NO: 2471

SEQ ID NO: 4807 - DNA, 41 bp, Homo sapiens; identical to SEQ ID NO: 2472

SEQ ID NO: 4808 - DNA, 44 bp, Homo sapiens; identical to SEQ ID NO: 2474
  misc_feature (21)..(24): tcac is present or absent.

SEQ ID NO: 4809 - DNA, 41 bp, Homo sapiens; identical to SEQ ID NO: 2475
  misc_feature (21)..(21): t is present or absent.

SEQ ID NO: 4810 - DNA, 51 bp, Homo sapiens; identical to SEQ ID NO: 2476
  misc_feature (30)..(31): t is present or absent.

SEQ ID NO: 4811 - DNA, 48 bp, Homo sapiens
  misc_feature (28)..(28): a is present or absent.
aaacacttgaataarttgagaaaaaaaaccccgttttcacataatgtt

SEQ ID NO: 4812 - DNA, 41 bp, Homo sapiens; identical to SEQ ID NO: 2478

SEQ ID NO: 4813 - DNA, 41 bp, Homo sapiens; identical to SEQ ID NO: 2479

SEQ ID NO: 4814 - DNA, 41 bp, Homo sapiens; identical to SEQ ID NO: 2480

SEQ ID NO: 4815 - DNA, 41 bp, Homo sapiens; identical to SEQ ID NO: 2481

SEQ ID NO: 4816 - DNA, 41 bp, Homo sapiens; identical to SEQ ID NO: 2482

SEQ ID NO: 4817 - DNA, 41 bp, Homo sapiens; identical to SEQ ID NO: 2483

SEQ ID NO: 4818 - DNA, 41 bp, Homo sapiens
acgagataagtgayggtcatrtggccagggaggaaggggac

SEQ ID NO: 4819 - DNA, 41 bp, Homo sapiens; identical to SEQ ID NO: 2487

SEQ ID NO: 4820 - DNA, 41 bp, Homo sapiens; identical to SEQ ID NO: 2488

SEQ ID NO: 4821 - DNA, 41 bp, Homo sapiens
ccctggcccccccgcccgccmcgggggcttaggctacactg

SEQ ID NO: 4822 - DNA, 41 bp, Homo sapiens
gcttggaggcatcttgaatgygcctcatccaaactggactg

SEQ ID NO: 4823 - DNA, 41 bp, Homo sapiens
gagcaaatccagcccacagcrtgtaaaatmctgataagtaa

SEQ ID NO: 4824 - DNA, 41 bp, Homo sapiens
cagcccacagcrtgtaaaatmctgataagtaattcagtggg

SEQ ID NO: 4825 - DNA, 41 bp, Homo sapiens
acagagatgagaaggaggctygggaatctaccctggctggt

SEQ ID NO: 4826 - DNA, 41 bp, Homo sapiens
tcttttgttccagaatatatytatatctagtttatttatgc

SEQ ID NO: 4827 - DNA, 41 bp, Homo sapiens
atttcagatatgtccattctytgggtgggtcaaagctacat

SEQ ID NO: 4828 - DNA, 41 bp, Homo sapiens
gggtgtctggaaacaaaactyattaccatatgagtatcttc

SEQ ID NO: 4829 - DNA, 41 bp, Homo sapiens
tccccctggggtttctgcagwtagaggtaatcagtacaggg

SEQ ID NO: 4830 - DNA, 41 bp, Homo sapiens
agcttcttgattagaaattcrgtaaagaattttttttagtc

SEQ ID NO: 4831 - DNA, 41 bp, Homo sapiens
ggagttacaggctttaagtasagcgaagagaattggaagaa

SEQ ID NO: 4832 - DNA, 41 bp, Homo sapiens
ttaaatgtggctgggggttayaaattgggtccccattaaag

SEQ ID NO: 4833 - DNA, 41 bp, Homo sapiens
gattatatgtctttgatgtgractcacactgagattgtacc

SEQ ID NO: 4834 - DNA, 41 bp, Homo sapiens
aaagcatttatgataataaartttcaaaacccaaacactta

SEQ ID NO: 4835 - DNA, 41 bp, Homo sapiens
cagagacattcaaagtgcatygctacccttgtgatcacaca

SEQ ID NO: 4836 - DNA, 41 bp, Homo sapiens
caactattgagttaccaacaygttaatatgaatgagctcac

SEQ ID NO: 4837 - DNA, 41 bp, Homo sapiens
gtaccgttagcttctctttgragctgattttaggacagcca

SEQ ID NO: 4838 - DNA, 41 bp, Homo sapiens
tcatggagctagtgggactcrtgcagggagagctccagggt

SEQ ID NO: 4839 - DNA, 41 bp, Homo sapiens
tcaacaagcctgcttactgcrgttagttgtgaccattgtct

SEQ ID NO: 4840 - DNA, 41 bp, Homo sapiens
tgtctaagtaatttaatgttktcctatgagagctgaaggag

SEQ ID NO: 4841 - DNA, 41 bp, Homo sapiens
aaggccctgaaatggctgttkctggctattgttccgagctc

SEQ ID NO: 4842 - DNA, 41 bp, Homo sapiens
caaacagaaagaattttataycttttgattgacagaaaata

SEQ ID NO: 4843 - DNA, 41 bp, Homo sapiens
attttcacaatgaatgttggktcggtctctccttccttttt

SEQ ID NO: 4844 - DNA, 41 bp, Homo sapiens
ggttagttctaactttctacrttggtaccttcaactttctg

SEQ ID NO: 4845 - DNA, 41 bp, Homo sapiens
tgaggattaaaataaaaaacygtaggaatgggctcaacagt

SEQ ID NO: 4846 - DNA, 41 bp, Homo sapiens
catagcactcagcaagaaacstgtgctaaagactgaggttc

SEQ ID NO: 4847 - DNA, 43 bp, Homo sapiens
  misc_feature (21)..(23): agg is present or absent.
gggcacagctccctgggagcaggagaactcccgatagcagagt

SEQ ID NO: 4848 - DNA, 47 bp, Homo sapiens
  misc_feature (21)..(27): taacatt is present or absent.
agcgggttgggtgagccctttaacattaggtaggtgtggtgttggct

SEQ ID NO: 4849 - DNA, 52 bp, Homo sapiens
  misc_feature (31)..(32): a is present or absent.
ggaattaagactagtcagacaaaaaaaaaaaagcctgcaggataaaagactg

SEQ ID NO: 4850 - DNA, 57 bp, Homo sapiens
  misc_feature (36)..(37): t is present or absent.
ctttttttgtagtctggtcctttttttttttttttttcttttcctgttcttactctg

SEQ ID NO: 4851 - DNA, 53 bp, Homo sapiens
  misc_feature (32)..(33): a is present or absent.
taccctaaaacttaaagtataaaaaaaaaaaaacctaccgaaaaaaaaaaaaa

SEQ ID NO: 4852 - DNA, 41 bp, Homo sapiens
aagagagctgcagcccagggkcacagacctgtgggccccat

SEQ ID NO: 4853 - DNA, 41 bp, Homo sapiens
cctttgactgaattcgggatrtggcaggatttgaagcagga

SEQ ID NO: 4854 - DNA, 41 bp, Homo sapiens
cctcacaacctgaaaggccakgtgtaaattgagaaattcta

SEQ ID NO: 4855 - DNA, 41 bp, Homo sapiens
tggtacgggggagccacttcyagcccgagccacaacctgtc

SEQ ID NO: 4856 - DNA, 41 bp, Homo sapiens
tgggacaatgaagcaatgtgyacagtgacagcggagagggc

SEQ ID NO: 4857 - DNA, 41 bp, Homo sapiens
gggttgaggtgggaatggaamtctggagttctactcactgg

SEQ ID NO: 4858 - DNA, 41 bp, Homo sapiens
tacacaaatcagcttaaagawctctcatgtacacaccacca

SEQ ID NO: 4859 - DNA, 41 bp, Homo sapiens
gaaaataaaccctggtcagaygcttgaggtcagcctccctc

SEQ ID NO: 4860 - DNA, 41 bp, Homo sapiens
aagggtgttctgggctccccrtaagtgtttgttgggtgcat

SEQ ID NO: 4861 - DNA, 41 bp, Homo sapiens
cagcttctaaaggagcccctmatctctcctgtctyccacag

SEQ ID NO: 4862 - DNA, 41 bp, Homo sapiens
gcccctmatctctcctgtctyccacagggcctccaggatag

SEQ ID NO: 4863 - DNA, 41 bp, Homo sapiens
ggaggtcagagacctcaactrccaggtagaggcacgcctgg

SEQ ID NO: 4864 - DNA, 41 bp, Homo sapiens
gaaataaaagggtgggcccamcttgcaggccctctgcccsc

SEQ ID NO: 4865 - DNA, 41 bp, Homo sapiens
amcttgcaggccctctgcccscaaggacagagtccagtcca

SEQ ID NO: 4866 - DNA, 41 bp, Homo sapiens
gacccccaggtccaagaagcyacagtgtccatgccccgctc

SEQ ID NO: 4867 - DNA, 41 bp, Homo sapiens
caggaggacaggccgcccctygccctctgtactcacattct

SEQ ID NO: 4868 - DNA, 41 bp, Homo sapiens
cacagaaaggtcacctccctmcctgtgctcaggtggcagcc

SEQ ID NO: 4869 - DNA, 41 bp, Homo sapiens
gcacctgccgacctggccatyggggaataatttaaagtaac

SEQ ID NO: 4870 - DNA, 41 bp, Homo sapiens
tggggcggtgcagcagtttamgacgctgatccggtaattat

SEQ ID NO: 4871 - DNA, 41 bp, Homo sapiens
gaaaaaaacagcatccagcarggcgttggtggcttatgcct

SEQ ID NO: 4872 - DNA, 41 bp, Homo sapiens
ttctcttttcctttcccttaytttttaggttactcagagag

SEQ ID NO: 4873 - DNA, 41 bp, Homo sapiens
aggaagcagaggttcagagargctacgtggctctccaaggc

SEQ ID NO: 4874 - DNA, 41 bp, Homo sapiens
cttttaaacgtttataataayggcagtgaaggtgctggctt

SEQ ID NO: 4875 - DNA, 41 bp, Homo sapiens
gcctccttcttcagcaatgcyctctacaactccttctacct

SEQ ID NO: 4876 - DNA, 41 bp, Homo sapiens
tgctttcatctggagatggayacttatcacttagatccaac

SEQ ID NO: 4877 - DNA, 53 bp, Homo sapiens
  misc_feature (32)..(33): t is present or absent.
tctcttagaaatggataagatttttttttttttgacagagtctcacgctgtgg

SEQ ID NO: 4878 - DNA, 41 bp, Homo sapiens
  misc_feature (21)..(21): t is present or absent.
tttatctttcccattttttttctgtataattttgggtcttt

SEQ ID NO: 4879 - DNA, 41 bp, Homo sapiens
  misc_feature (21)..(21): t is present or absent.
tcagagcacagaggtttttttatagaactctctccggtcca

SEQ ID NO: 4880 - DNA, 52 bp, Homo sapiens
  misc_feature (31)..(32): a is present or absent.
tggctttactgtgcctatttaaaaaaaaaaaatgagagacttgggcaatatg

SEQ ID NO: 4881 - DNA, 41 bp, Homo sapiens
  misc_feature (21)..(21): t is present or absent.
tttcctttcccttayttttttaggttactcagagagggcaa

SEQ ID NO: 4882 - DNA, 40 bp, Homo sapiens
tttcctttcccttaytttttaggttactcagagagggcaa

SEQ ID NO: 4883 - DNA, 49 bp, Homo sapiens
  misc_feature (28)..(29): c is present or absent.
ggcagggttgagagcaagtgcccccccccacccaccagggtgggggtaa

SEQ ID NO: 4884 - DNA, 41 bp, Homo sapiens
  misc_feature (21)..(21): a is present or absent.
tcctggggacagtgaggacaatgaccctacagatgctcagc

SEQ ID NO: 4885 - DNA, 41 bp, Homo sapiens; identical to SEQ ID NO: 2489

SEQ ID NO: 4886 - DNA, 41 bp, Homo sapiens; identical to SEQ ID NO: 2490

SEQ ID NO: 4887 - DNA, 41 bp, Homo sapiens; identical to SEQ ID NO: 2491

SEQ ID NO: 4888 - DNA, 41 bp, Homo sapiens; identical to SEQ ID NO: 2492

SEQ ID NO: 4889 - DNA, 41 bp, Homo sapiens; identical to SEQ ID NO: 2493

SEQ ID NO: 4890 - DNA, 41 bp, Homo sapiens; identical to SEQ ID NO: 2494

SEQ ID NO: 4891 - DNA, 56 bp, Homo sapiens; identical to SEQ ID NO: 2495
  misc_feature (34)..(36): t is present or absent.

SEQ ID NO: 4892 - DNA, 50 bp, Homo sapiens; identical to SEQ ID NO: 2496
  misc_feature (30)..(30): t is present or absent.

SEQ ID NO: 4893 - DNA, 56 bp, Homo sapiens; identical to SEQ ID NO: 2497
  misc_feature (35)..(36): t is present or absent.

SEQ ID NO: 4894 - DNA, 57 bp, Homo sapiens; identical to SEQ ID NO: 2498
  misc_feature (34)..(37): t is present or absent.

SEQ ID NO: 4895 - DNA, 41 bp, Homo sapiens; identical to SEQ ID NO: 2499
  misc_feature (21)..(21): t is present or absent.

SEQ ID NO: 4896 - DNA, 40 bp, Homo sapiens; identical to SEQ ID NO: 2500

SEQ ID NO: 4897 - DNA, 49 bp, Homo sapiens; identical to SEQ ID NO: 2501
  misc_feature (29)..(29): a is present or absent.

SEQ ID NO: 4898 - DNA, 49 bp, Homo sapiens; identical to SEQ ID NO: 2502
  misc_feature (29)..(29): t is present or absent.

SEQ ID NO: 4899 - DNA, 56 bp, Homo sapiens; identical to SEQ ID NO: 2503
  misc_feature (21)..(36): gcagtattac tgtagt is present or absent.

SEQ ID NO: 4900 - DNA, 54 bp, Homo sapiens; identical to SEQ ID NO: 2504
  misc_feature (34)..(34): t is present or absent.

SEQ ID NO: 4901 - DNA, 50 bp, Homo sapiens; identical to SEQ ID NO: 2505
  misc_feature (30)..(30): t is present or absent.

SEQ ID NO: 4902 - DNA, 51 bp, Homo sapiens; identical to SEQ ID NO: 2506
  misc_feature (31)..(31): t is present or absent.

SEQ ID NO: 4903 - DNA, 41 bp, Homo sapiens
gccagccccatcggggttccycgccgccggaagcggaaata

SEQ ID NO: 4904 - DNA, 41 bp, Homo sapiens
gcacgagactgaccgggcccstgcgggagttactgcgcatg

SEQ ID NO: 4905 - DNA, 41 bp, Homo sapiens
tgactttaaccgaccacctcyctctcttctcgggcagaaaa

SEQ ID NO: 4906 - DNA, 41 bp, Homo sapiens
agtgtgccctcatccctgctmcatggggaccaagctgtagt

SEQ ID NO: 4907 - DNA, 54 bp, Homo sapiens
  misc_feature (31)..(34): a is present or absent.
acagagcgagactccgtctcaaaaaaaaaaaaaagaaaaaaaaaaaaaacattt

SEQ ID NO: 4908 - DNA, 55 bp, Homo sapiens
  misc_feature (34)..(35): a is present or absent.
cgtctcaaaaaaaaaaaaagaaaaaaaaaaaaaaacatttcatcagacctgtctt

SEQ ID NO: 4909 - DNA, 41 bp, Homo sapiens
  misc_feature (21)..(21): a is present or absent.
tcagccggccccgagagtgaagctttccttcccagaagtct

SEQ ID NO: 4910 - DNA, 41 bp, Homo sapiens
  misc_feature (21)..(21): t is present or absent.
attaatttgatcaattgtcttaatatgtcgtactctagatt

SEQ ID NO: 4911 - DNA, 40 bp, Homo sapiens
attaatttgatcaattgtctaatatgtcgtactctagatt

SEQ ID NO: 4912 - DNA, 41 bp, Homo sapiens; identical to SEQ ID NO: 3015

SEQ ID NO: 4913 - DNA, 41 bp, Homo sapiens; identical to SEQ ID NO: 3016

SEQ ID NO: 4914 - DNA, 41 bp, Homo sapiens; identical to SEQ ID NO: 3017

SEQ ID NO: 4915 - DNA, 41 bp, Homo sapiens; identical to SEQ ID NO: 3018

SEQ ID NO: 4916 - DNA, 41 bp, Homo sapiens; identical to SEQ ID NO: 3019

SEQ ID NO: 4917 - DNA, 41 bp, Homo sapiens; identical to SEQ ID NO: 3020

SEQ ID NO: 4918 - DNA, 55 bp, Homo sapiens; identical to SEQ ID NO: 3021
  misc_feature (34)..(35): a is present or absent.

SEQ ID NO: 4919 - DNA, 55 bp, Homo sapiens; identical to SEQ ID NO: 3022
  misc_feature (33)..(35): a is present or absent.

SEQ ID NO: 4920 - DNA, 41 bp, Homo sapiens; identical to SEQ ID NO: 3023

SEQ ID NO: 4921 - DNA, 41 bp, Homo sapiens
ccacatccatcattcgagacmmactcgtctcagctgccatg

SEQ ID NO: 4922 - DNA, 41 bp, Homo sapiens
cacatccatcattcgagacmmactcgtctcagctgccatga

SEQ ID NO: 4923 - DNA, 41 bp, Homo sapiens; identical to SEQ ID NO: 3027

SEQ ID NO: 4924 - DNA, 41 bp, Homo sapiens; identical to SEQ ID NO: 3028

SEQ ID NO: 4925 - DNA, 41 bp, Homo sapiens; identical to SEQ ID NO: 3029

SEQ ID NO: 4926 - DNA, 41 bp, Homo sapiens; identical to SEQ ID NO: 3031

SEQ ID NO: 4927 - DNA, 41 bp, Homo sapiens; identical to SEQ ID NO: 3032

SEQ ID NO: 4928 - DNA, 41 bp, Homo sapiens; identical to SEQ ID NO: 3033

SEQ ID NO: 4929 - DNA, 41 bp, Homo sapiens; identical to SEQ ID NO: 3034

SEQ ID NO: 4930 - DNA, 41 bp, Homo sapiens; identical to SEQ ID NO: 3035

SEQ ID NO: 4931 - DNA, 41 bp, Homo sapiens; identical to SEQ ID NO: 3036

SEQ ID NO: 4932 - DNA, 41 bp, Homo sapiens; identical to SEQ ID NO: 3037

SEQ ID NO: 4933 - DNA, 41 bp, Homo sapiens; identical to SEQ ID NO: 3038

SEQ ID NO: 4934 - DNA, 41 bp, Homo sapiens; identical to SEQ ID NO: 3039

SEQ ID NO: 4935 - DNA, 41 bp, Homo sapiens; identical to SEQ ID NO: 3041

SEQ ID NO: 4936 - DNA, 41 bp, Homo sapiens
  misc_feature (21)..(21): g is present or absent.
tacatttggtccccaggggggaagcggctgatcaggagaga

SEQ ID NO: 4937 - DNA, 40 bp, Homo sapiens
tacatttggtccccagggggaagcggctgatcaggagaga

SEQ ID NO: 4938 - DNA, 42 bp, Homo sapiens; identical to SEQ ID NO: 3044
  misc_feature (21)..(22): aa is present or absent.

SEQ ID NO: 4939 - DNA, 41 bp, Homo sapiens; identical to SEQ ID NO: 2765

SEQ ID NO: 4940 - DNA, 41 bp, Homo sapiens; identical to SEQ ID NO: 2766

SEQ ID NO: 4941 - DNA, 41 bp, Homo sapiens; identical to SEQ ID NO: 2767

SEQ ID NO: 4942 - DNA, 41 bp, Homo sapiens; identical to SEQ ID NO: 2768

SEQ ID NO: 4943 - DNA, 41 bp, Homo sapiens; identical to SEQ ID NO: 2769

SEQ ID NO: 4944 - DNA, 41 bp, Homo sapiens; identical to SEQ ID NO: 2770

SEQ ID NO: 4945 - DNA, 41 bp, Homo sapiens; identical to SEQ ID NO: 2771

SEQ ID NO: 4946 - DNA, 41 bp, Homo sapiens; identical to SEQ ID NO: 2772

SEQ ID NO: 4947 - DNA, 41 bp, Homo sapiens
aactagttaggcaacccatgygttttagggraaaagcaatg

SEQ ID NO: 4948 - DNA, 41 bp, Homo sapiens
gcaacccatgygttttagggraaaagcaatgaggtcatgat

SEQ ID NO: 4949 - DNA, 41 bp, Homo sapiens; identical to SEQ ID NO: 2775

SEQ ID NO: 4950 - DNA, 41 bp, Homo sapiens; identical to SEQ ID NO: 2776

SEQ ID NO: 4951 - DNA, 41 bp, Homo sapiens; identical to SEQ ID NO: 2777

SEQ ID NO: 4952 - DNA, 41 bp, Homo sapiens; identical to SEQ ID NO: 2779

SEQ ID NO: 4953 - DNA, 41 bp, Homo sapiens; identical to SEQ ID NO: 2780

SEQ ID NO: 4954 - DNA, 41 bp, Homo sapiens; identical to SEQ ID NO: 2781

SEQ ID NO: 4955 - DNA, 41 bp, Homo sapiens; identical to SEQ ID NO: 2782

SEQ ID NO: 4956 - DNA, 41 bp, Homo sapiens; identical to SEQ ID NO: 2783

SEQ ID NO: 4957 - DNA, 41 bp, Homo sapiens; identical to SEQ ID NO: 2784

SEQ ID NO: 4958 - DNA, 41 bp, Homo sapiens; identical to SEQ ID NO: 2785

SEQ ID NO: 4959 - DNA, 41 bp, Homo sapiens; identical to SEQ ID NO: 2786

SEQ ID NO: 4960 - DNA, 41 bp, Homo sapiens; identical to SEQ ID NO: 2787

SEQ ID NO: 4961 - DNA, 41 bp, Homo sapiens; identical to SEQ ID NO: 2788

SEQ ID NO: 4962 - DNA, 41 bp, Homo sapiens; identical to SEQ ID NO: 2789

SEQ ID NO: 4963 - DNA, 41 bp, Homo sapiens; identical to SEQ ID NO: 2790

SEQ ID NO: 4964 - DNA, 41 bp, Homo sapiens; identical to SEQ ID NO: 2791

SEQ ID NO: 4965 - DNA, 41 bp, Homo sapiens; identical to SEQ ID NO: 2792

SEQ ID NO: 4966 - DNA, 41 bp, Homo sapiens; identical to SEQ ID NO: 2793

SEQ ID NO: 4967 - DNA, 41 bp, Homo sapiens; identical to SEQ ID NO: 2794

SEQ ID NO: 4968 - DNA, 41 bp, Homo sapiens; identical to SEQ ID NO: 2795

SEQ ID NO: 4969 - DNA, 41 bp, Homo sapiens; identical to SEQ ID NO: 2796

SEQ ID NO: 4970 - DNA, 41 bp, Homo sapiens; identical to SEQ ID NO: 2797

SEQ ID NO: 4971 - DNA, 41 bp, Homo sapiens; identical to SEQ ID NO: 2798

SEQ ID NO: 4972 - DNA, 41 bp, Homo sapiens; identical to SEQ ID NO: 2799

SEQ ID NO: 4973 - DNA, 41 bp, Homo sapiens; identical to SEQ ID NO: 2800

SEQ ID NO: 4974 - DNA, 41 bp, Homo sapiens; identical to SEQ ID NO: 2801

SEQ ID NO: 4975 - DNA, 41 bp, Homo sapiens; identical to SEQ ID NO: 2802

SEQ ID NO: 4976 - DNA, 41 bp, Homo sapiens
tctctggtctccaaaatcatrtattttctccctctttamat

SEQ ID NO: 4977 - DNA, 41 bp, Homo sapiens
atrtattttctccctctttamattttgctgaaacaatcttc

SEQ ID NO: 4978 - DNA, 41 bp, Homo sapiens; identical to SEQ ID NO: 2805

SEQ ID NO: 4979 - DNA, 41 bp, Homo sapiens; identical to SEQ ID NO: 2806

SEQ ID NO: 4980 - DNA, 41 bp, Homo sapiens; identical to SEQ ID NO: 2807

SEQ ID NO: 4981 - DNA, 41 bp, Homo sapiens; identical to SEQ ID NO: 2808

SEQ ID NO: 4982 - DNA, 41 bp, Homo sapiens; identical to SEQ ID NO: 2809

SEQ ID NO: 4983 - DNA, 41 bp, Homo sapiens; identical to SEQ ID NO: 2810
  misc_feature (21)..(21): a is present or absent.

SEQ ID NO: 4984 - DNA, 40 bp, Homo sapiens; identical to SEQ ID NO: 2811

SEQ ID NO: 4985 - DNA, 42 bp, Homo sapiens; identical to SEQ ID NO: 2812
  misc_feature (21)..(22): aa is present or absent.

SEQ ID NO: 4986 - DNA, 42 bp, Homo sapiens; identical to SEQ ID NO: 2813
  misc_feature (21)..(22): ca is present or absent.

SEQ ID NO: 4987 - DNA, 41 bp, Homo sapiens; identical to SEQ ID NO: 2814
  misc_feature (21)..(21): t is present or absent.

SEQ ID NO: 4988 - DNA, 46 bp, Homo sapiens; identical to SEQ ID NO: 2815
  misc_feature (21)..(26): tgtgtg is present or absent.

SEQ ID NO: 4989 - DNA, 41 bp, Homo sapiens; identical to SEQ ID NO: 2816

SEQ ID NO: 4990 - DNA, 41 bp, Homo sapiens; identical to SEQ ID NO: 2819

SEQ ID NO: 4991 - DNA, 41 bp, Homo sapiens; identical to SEQ ID NO: 2820

SEQ ID NO: 4992 - DNA, 41 bp, Homo sapiens; identical to SEQ ID NO: 2821

SEQ ID NO: 4993 - DNA, 41 bp, Homo sapiens; identical to SEQ ID NO: 2822

SEQ ID NO: 4994 - DNA, 41 bp, Homo sapiens; identical to SEQ ID NO: 2823

SEQ ID NO: 4995 - DNA, 41 bp, Homo sapiens; identical to SEQ ID NO: 2824

SEQ ID NO: 4996 - DNA, 41 bp, Homo sapiens; identical to SEQ ID NO: 2825

SEQ ID NO: 4997 - DNA, 41 bp, Homo sapiens
ttgctattatataattttttwwaaaaaagatttcctaatat

SEQ ID NO: 4998 - DNA, 40 bp, Homo sapiens
tgctattatataattttttwwaaaaaagatttcctaatat

SEQ ID NO: 4999 - DNA, 41 bp, Homo sapiens; identical to SEQ ID NO: 2828

SEQ ID NO: 5000 - DNA, 41 bp, Homo sapiens; identical to SEQ ID NO: 2829

SEQ ID NO: 5001 - DNA, 41 bp, Homo sapiens; identical to SEQ ID NO: 2831

SEQ ID NO: 5002 - DNA, 41 bp, Homo sapiens; identical to SEQ ID NO: 2832

SEQ ID NO: 5003 - DNA, 41 bp, Homo sapiens; identical to SEQ ID NO: 2833

SEQ ID NO: 5004 - DNA, 41 bp, Homo sapiens; identical to SEQ ID NO: 2834

SEQ ID NO: 5005 - DNA, 41 bp, Homo sapiens; identical to SEQ ID NO: 2835

SEQ ID NO: 5006 - DNA, 41 bp, Homo sapiens; identical to SEQ ID NO: 2836

SEQ ID NO: 5007 - DNA, 41 bp, Homo sapiens; identical to SEQ ID NO: 2837

SEQ ID NO: 5008 - DNA, 41 bp, Homo sapiens; identical to SEQ ID NO: 2839

SEQ ID NO: 5009 - DNA, 41 bp, Homo sapiens; identical to SEQ ID NO: 2840

SEQ ID NO: 5010 - DNA, 41 bp, Homo sapiens; identical to SEQ ID NO: 2841

SEQ ID NO: 5011 - DNA, 41 bp, Homo sapiens; identical to SEQ ID NO: 2842

SEQ ID NO: 5012 - DNA, 41 bp, Homo sapiens
cctatctgcacataacattayaaacttatggcaattatara

SEQ ID NO: 5013 - DNA, 41 bp, Homo sapiens
ayaaacttatggcaattataraactcaatacatattatact

SEQ ID NO: 5014 - DNA, 41 bp, Homo sapiens; identical to SEQ ID NO: 2845

SEQ ID NO: 5015 - DNA, 41 bp, Homo sapiens; identical to SEQ ID NO: 2846

SEQ ID NO: 5016 - DNA, 41 bp, Homo sapiens; identical to SEQ ID NO: 2847

SEQ ID NO: 5017 - DNA, 41 bp, Homo sapiens; identical to SEQ ID NO: 2848

SEQ ID NO: 5018 - DNA, 41 bp, Homo sapiens; identical to SEQ ID NO: 2849

SEQ ID NO: 5019 - DNA, 41 bp, Homo sapiens; identical to SEQ ID NO: 2850

SEQ ID NO: 5020 - DNA, 41 bp, Homo sapiens; identical to SEQ ID NO: 2851

SEQ ID NO: 5021 - DNA, 41 bp, Homo sapiens; identical to SEQ ID NO: 2852

SEQ ID NO: 5022 - DNA, 41 bp, Homo sapiens; identical to SEQ ID NO: 2853

SEQ ID NO: 5023 - DNA, 41 bp, Homo sapiens; identical to SEQ ID NO: 2854

SEQ ID NO: 5024 - DNA, 41 bp, Homo sapiens; identical to SEQ ID NO: 2855

SEQ ID NO: 5025 - DNA, 41 bp, Homo sapiens; identical to SEQ ID NO: 2856

SEQ ID NO: 5026 - DNA, 41 bp, Homo sapiens; identical to SEQ ID NO: 2857

SEQ ID NO: 5027 - DNA, 41 bp, Homo sapiens; identical to SEQ ID NO: 2858

SEQ ID NO: 5028 - DNA, 41 bp, Homo sapiens; identical to SEQ ID NO: 2859

SEQ ID NO: 5029 - DNA, 41 bp, Homo sapiens
acaacacaggtttaaactacrcrttttcacttctatgcaaa

SEQ ID NO: 5030 - DNA, 41 bp, Homo sapiens
aacacaggtttaaactacrcrttttcacttctatgcaaatt

SEQ ID NO: 5031 - DNA, 41 bp, Homo sapiens
atataactttgctttcattgyaaaaggcaaactrttatatc

SEQ ID NO: 5032 - DNA, 41 bp, Homo sapiens
ttcattgyaaaaggcaaactrttatatcatttaaagacttt

SEQ ID NO: 5033 - DNA, 41 bp, Homo sapiens; identical to SEQ ID NO: 2864

SEQ ID NO: 5034 - DNA, 41 bp, Homo sapiens; identical to SEQ ID NO: 2865

SEQ ID NO: 5035 - DNA, 41 bp, Homo sapiens
ccttgattgtaataatctccmcmtgccaagagtggggccag

SEQ ID NO: 5036 - DNA, 41 bp, Homo sapiens
ttgattgtaataatctccmcmtgccaagagtggggccaggt

SEQ ID NO: 5037 - DNA, 41 bp, Homo sapiens; identical to SEQ ID NO: 2868

SEQ ID NO: 5038 - DNA, 41 bp, Homo sapiens; identical to SEQ ID NO: 2869

SEQ ID NO: 5039 - DNA, 41 bp, Homo sapiens; identical to SEQ ID NO: 2870

SEQ ID NO: 5040 - DNA, 41 bp, Homo sapiens; identical to SEQ ID NO: 2871

SEQ ID NO: 5041 - DNA, 41 bp, Homo sapiens; identical to SEQ ID NO: 2872

SEQ ID NO: 5042 - DNA, 41 bp, Homo sapiens; identical to SEQ ID NO: 2873

SEQ ID NO: 5043 - DNA, 41 bp, Homo sapiens; identical to SEQ ID NO: 2874

SEQ ID NO: 5044 - DNA, 41 bp, Homo sapiens; identical to SEQ ID NO: 2875

SEQ ID NO: 5045 - DNA, 41 bp, Homo sapiens; identical to SEQ ID NO: 2876

SEQ ID NO: 5046 - DNA, 41 bp, Homo sapiens; identical to SEQ ID NO: 2880

SEQ ID NO: 5047 - DNA, 41 bp, Homo sapiens; identical to SEQ ID NO: 2881

SEQ ID NO: 5048 - DNA, 41 bp, Homo sapiens
tcgggagaagtttctccctaygtaattagagtaatatttmt

SEQ ID NO: 5049 - DNA, 41 bp, Homo sapiens
aygtaattagagtaatatttmttttggtaattatctatcta

SEQ ID NO: 5050 - DNA, 41 bp, Homo sapiens; identical to SEQ ID NO: 2884

SEQ ID NO: 5051 - DNA, 41 bp, Homo sapiens; identical to SEQ ID NO: 2885

SEQ ID NO: 5052 - DNA, 41 bp, Homo sapiens; identical to SEQ ID NO: 2887

SEQ ID NO: 5053 - DNA, 41 bp, Homo sapiens; identical to SEQ ID NO: 2888

SEQ ID NO: 5054 - DNA, 41 bp, Homo sapiens; identical to SEQ ID NO: 2889

SEQ ID NO: 5055 - DNA, 41 bp, Homo sapiens; identical to SEQ ID NO: 2891

SEQ ID NO: 5056 - DNA, 41 bp, Homo sapiens; identical to SEQ ID NO: 2892

SEQ ID NO: 5057 - DNA, 41 bp, Homo sapiens; identical to SEQ ID NO: 2893

SEQ ID NO: 5058 - DNA, 41 bp, Homo sapiens; identical to SEQ ID NO: 2894

SEQ ID NO: 5059 - DNA, 41 bp, Homo sapiens; identical to SEQ ID NO: 2895

SEQ ID NO: 5060 - DNA, 41 bp, Homo sapiens
aacattccaaaacttttaatygaytmacagcatgactttta

SEQ ID NO: 5061 - DNA, 41 bp, Homo sapiens
attccaaaacttttaatygaytmacagcatgacttttataa

SEQ ID NO: 5062 - DNA, 41 bp, Homo sapiens
tccaaaacttttaatygaytmacagcatgacttttataata

SEQ ID NO: 5063 - DNA, 41 bp, Homo sapiens; identical to SEQ ID NO: 2899

SEQ ID NO: 5064 - DNA, 41 bp, Homo sapiens; identical to SEQ ID NO: 2900

SEQ ID NO: 5065 - DNA, 41 bp, Homo sapiens; identical to SEQ ID NO: 2901

SEQ ID NO: 5066 - DNA, 41 bp, Homo sapiens; identical to SEQ ID NO: 2902

SEQ ID NO: 5067 - DNA, 41 bp, Homo sapiens; identical to SEQ ID NO: 2903

SEQ ID NO: 5068 - DNA, 41 bp, Homo sapiens; identical to SEQ ID NO: 2904

SEQ ID NO: 5069 - DNA, 41 bp, Homo sapiens; identical to SEQ ID NO: 2905

SEQ ID NO: 5070 - DNA, 41 bp, Homo sapiens; identical to SEQ ID NO: 2906

SEQ ID NO: 5071 - DNA, 41 bp, Homo sapiens; identical to SEQ ID NO: 2907

SEQ ID NO: 5072 - DNA, 41 bp, Homo sapiens; identical to SEQ ID NO: 2908

SEQ ID NO: 5073 - DNA, 41 bp, Homo sapiens; identical to SEQ ID NO: 2909

SEQ ID NO: 5074 - DNA, 41 bp, Homo sapiens; identical to SEQ ID NO: 2910

SEQ ID NO: 5075 - DNA, 41 bp, Homo sapiens; identical to SEQ ID NO: 2911

SEQ ID NO: 5076 - DNA, 41 bp, Homo sapiens; identical to SEQ ID NO: 2912
  misc_feature (21)..(21): a is present or absent.

SEQ ID NO: 5077 - DNA, 40 bp, Homo sapiens; identical to SEQ ID NO: 2913

SEQ ID NO: 5078 - DNA, 41 bp, Homo sapiens; identical to SEQ ID NO: 2914
  misc_feature (21)..(21): g is present or absent.

SEQ ID NO: 5079 - DNA, 40 bp, Homo sapiens; identical to SEQ ID NO: 2915

SEQ ID NO: 5080 - DNA, 44 bp, Homo sapiens; identical to SEQ ID NO: 2916
  misc_feature (21)..(24): actt is present or absent.

SEQ ID NO: 5081 - DNA, 44 bp, Homo sapiens; identical to SEQ ID NO: 2917
  misc_feature (21)..(24): ttta is present or absent.

SEQ ID NO: 5082 - DNA, 53 bp, Homo sapiens; identical to SEQ ID NO: 2918
  misc_feature (32)..(33): a is present or absent.

SEQ ID NO: 5083 - DNA, 50 bp, Homo sapiens; identical to SEQ ID NO: 2919
  misc_feature (29)..(30): t is present or absent.

SEQ ID NO: 5084 - DNA, 54 bp, Homo sapiens; identical to SEQ ID NO: 2920
  misc_feature (33)..(34): a is present or absent.

SEQ ID NO: 5085 - DNA, 46 bp, Homo sapiens; identical to SEQ ID NO: 2921
  misc_feature (21)..(26): cttgta is present or absent.

SEQ ID NO: 5086 - DNA, 50 bp, Homo sapiens; identical to SEQ ID NO: 2922
  misc_feature (30)..(30): a is present or absent.

SEQ ID NO: 5087 - DNA, 43 bp, Homo sapiens; identical to SEQ ID NO: 2923
  misc_feature (21)..(23): ctt is present or absent.

SEQ ID NO: 5088 - DNA, 43 bp, Homo sapiens; identical to SEQ ID NO: 2924
  misc_feature (21)..(23): ctt is present or absent.

SEQ ID NO: 5089 - DNA, 40 bp, Homo sapiens; identical to SEQ ID NO: 2925

SEQ ID NO: 5090 - DNA, 41 bp, Homo sapiens
  misc_feature (21)..(21): a is present or absent.
aacaagygagacttcactaaatataatrcaatgtatttgca

SEQ ID NO: 5091 - DNA, 51 bp, Homo sapiens; identical to SEQ ID NO: 2927
  misc_feature (30)..(31): a is present or absent.

SEQ ID NO: 5092 - DNA, 43 bp, Homo sapiens; identical to SEQ ID NO: 2928
  misc_feature (21)..(23): tgt is present or absent.

SEQ ID NO: 5093 - DNA, 67 bp, Homo sapiens; identical to SEQ ID NO: 2929
  misc_feature (45)..(47): a is present or absent.

SEQ ID NO: 5094 - DNA, 82 bp, Homo sapiens
  misc_feature (41)..(42): ta is present or absent.
  misc_feature (43)..(44): ta is present or absent.
  misc_feature (45)..(46): ta is present or absent.
  misc_feature (47)..(48): ta is present or absent.
  misc_feature (49)..(50): ta is present or absent.
  misc_feature (51)..(52): ta is present or absent.
  misc_feature (53)..(54): ta is present or absent.
  misc_feature (55)..(56): ta is present or absent.
  misc_feature (57)..(58): ta is present or absent.
  misc_feature (59)..(60): ta is present or absent.
  misc_feature (61)..(62): ta is present or absent.
aaaaaaaaaaaaaaaaaaaatatatatatatatatatatatatatatatatatatatatatayacacacacatacatatatt

SEQ ID NO: 5095 - DNA, 50 bp, Homo sapiens; identical to SEQ ID NO: 2931
  misc_feature (9)..(10): a is present or absent.

SEQ ID NO: 5096 - DNA, 53 bp, Homo sapiens
  misc_feature (31)..(33): a is present or absent.
aattctcttaaaataatgttaaaaaaaaaaaaagtctgcytttacagcaattg

SEQ ID NO: 5097 - DNA, 50 bp, Homo sapiens; identical to SEQ ID NO: 2933
  misc_feature (29)..(30): a is present or absent.

SEQ ID NO: 5098 - DNA, 41 bp, Homo sapiens; identical to SEQ ID NO: 2934

SEQ ID NO: 5099 - DNA, 41 bp, Homo sapiens; identical to SEQ ID NO: 2936

SEQ ID NO: 5100 - DNA, 41 bp, Homo sapiens; identical to SEQ ID NO: 2937

SEQ ID NO: 5101 - DNA, 41 bp, Homo sapiens; identical to SEQ ID NO: 2938

SEQ ID NO: 5102 - DNA, 41 bp, Homo sapiens; identical to SEQ ID NO: 2939

SEQ ID NO: 5103 - DNA, 41 bp, Homo sapiens; identical to SEQ ID NO: 2940

SEQ ID NO: 5104 - DNA, 41 bp, Homo sapiens; identical to SEQ ID NO: 2941

SEQ ID NO: 5105 - DNA, 41 bp, Homo sapiens; identical to SEQ ID NO: 2942

SEQ ID NO: 5106 - DNA, 41 bp, Homo sapiens
aatgtcttgggcatatttgcrttcatttggggcaytcagtt

SEQ ID NO: 5107 - DNA, 41 bp, Homo sapiens
atttgcrttcatttggggcaytcagttctactagatacaaa

SEQ ID NO: 5108 - DNA, 41 bp, Homo sapiens; identical to SEQ ID NO: 2945

SEQ ID NO: 5109 - DNA, 41 bp, Homo sapiens; identical to SEQ ID NO: 2946

SEQ ID NO: 5110 - DNA, 41 bp, Homo sapiens; identical to SEQ ID NO: 2947

SEQ ID NO: 5111 - DNA, 41 bp, Homo sapiens; identical to SEQ ID NO: 2948

SEQ ID NO: 5112 - DNA, 41 bp, Homo sapiens; identical to SEQ ID NO: 2949

SEQ ID NO: 5113 - DNA, 41 bp, Homo sapiens; identical to SEQ ID NO: 2950

SEQ ID NO: 5114 - DNA, 41 bp, Homo sapiens; identical to SEQ ID NO: 2951

SEQ ID NO: 5115 - DNA, 41 bp, Homo sapiens; identical to SEQ ID NO: 2952

SEQ ID NO: 5116 - DNA, 41 bp, Homo sapiens; identical to SEQ ID NO: 2953

SEQ ID NO: 5117 - DNA, 41 bp, Homo sapiens; identical to SEQ ID NO: 2954

SEQ ID NO: 5118 - DNA, 41 bp, Homo sapiens; identical to SEQ ID NO: 2955

SEQ ID NO: 5119 - DNA, 41 bp, Homo sapiens; identical to SEQ ID NO: 2956

SEQ ID NO: 5120 - DNA, 41 bp, Homo sapiens; identical to SEQ ID NO: 2957

SEQ ID NO: 5121 - DNA, 41 bp, Homo sapiens; identical to SEQ ID NO: 2958

SEQ ID NO: 5122 - DNA, 41 bp, Homo sapiens; identical to SEQ ID NO: 2959

SEQ ID NO: 5123 - DNA, 41 bp, Homo sapiens; identical to SEQ ID NO: 2960

SEQ ID NO: 5124 - DNA, 41 bp, Homo sapiens; identical to SEQ ID NO: 2961

SEQ ID NO: 5125 - DNA, 41 bp, Homo sapiens; identical to SEQ ID NO: 2962

SEQ ID NO: 5126 - DNA, 41 bp, Homo sapiens
cctttattttttgagaacctrgtggatgatattaagamgta

SEQ ID NO: 5127 - DNA, 41 bp, Homo sapiens
cctrgtggatgatattaagamgtatatagatcactgtaata

SEQ ID NO: 5128 - DNA, 41 bp, Homo sapiens; identical to SEQ ID NO: 2965

SEQ ID NO: 5129 - DNA, 41 bp, Homo sapiens; identical to SEQ ID NO: 2966

SEQ ID NO: 5130 - DNA, 41 bp, Homo sapiens; identical to SEQ ID NO: 2967

SEQ ID NO: 5131 - DNA, 41 bp, Homo sapiens; identical to SEQ ID NO: 2968

SEQ ID NO: 5132 - DNA, 41 bp, Homo sapiens
atttattttgagcaaaggtcrcractctycttagaaagcct

SEQ ID NO: 5133 - DNA, 41 bp, Homo sapiens
ttattttgagcaaaggtcrcractctyttagaaagcctcac

SEQ ID NO: 5134 - DNA, 41 bp, Homo sapiens
tgagcaaaggtcrcractctyttagaaagcctcacaaatca

SEQ ID NO: 5135 - DNA, 41 bp, Homo sapiens; identical to SEQ ID NO: 2972

SEQ ID NO: 5136 - DNA, 41 bp, Homo sapiens; identical to SEQ ID NO: 2973

SEQ ID NO: 5137 - DNA, 41 bp, Homo sapiens
acaaaatttctccatcttgtratawcatcgttgttctgcat

SEQ ID NO: 5138 - DNA, 41 bp, Homo sapiens
aatttctccatcttgtratawcatcgttgttctgcatttga

SEQ ID NO: 5139 - DNA, 41 bp, Homo sapiens; identical to SEQ ID NO: 2976

SEQ ID NO: 5140 - DNA, 41 bp, Homo sapiens; identical to SEQ ID NO: 2977

SEQ ID NO: 5141 - DNA, 41 bp, Homo sapiens; identical to SEQ ID NO: 2978

SEQ ID NO: 5142 - DNA, 41 bp, Homo sapiens; identical to SEQ ID NO: 2979

SEQ ID NO: 5143 - DNA, 41 bp, Homo sapiens; identical to SEQ ID NO: 2980

SEQ ID NO: 5144 - DNA, 41 bp, Homo sapiens; identical to SEQ ID NO: 2981

SEQ ID NO: 5145 - DNA, 41 bp, Homo sapiens
tccctggtcctgtgttgtccwgyagtgaagacctgaaagag

SEQ ID NO: 5146 - DNA, 41 bp, Homo sapiens
cctggtcctgtgttgtccwgyagtgaagacctgaaagagag

SEQ ID NO: 5147 - DNA, 41 bp, Homo sapiens
cccattttcatgagtggctarrttttgtcccgtttcaaact

SEQ ID NO: 5148 - DNA, 41 bp, Homo sapiens
ccattttcatgagtggctarrttttgtcccgtttcaaacta

SEQ ID NO: 5149 - DNA, 41 bp, Homo sapiens; identical to SEQ ID NO: 2989

SEQ ID NO: 5150 - DNA, 41 bp, Homo sapiens; identical to SEQ ID NO: 2994

SEQ ID NO: 5151 - DNA, 41 bp, Homo sapiens; identical to SEQ ID NO: 2995

SEQ ID NO: 5152 - DNA, 41 bp, Homo sapiens; identical to SEQ ID NO: 2996

SEQ ID NO: 5153 - DNA, 41 bp, Homo sapiens; identical to SEQ ID NO: 2997

SEQ ID NO: 5154 - DNA, 41 bp, Homo sapiens; identical to SEQ ID NO: 2998

SEQ ID NO: 5155 - DNA, 44 bp, Homo sapiens
  misc_feature (21)..(24): ctat is present or absent.
tacataacatatacctatatctatgttatgtgtctgcttatata

SEQ ID NO: 5156 - DNA, 58 bp, Homo sapiens; identical to SEQ ID NO: 3000
  misc_feature (21)..(38): atattcacttggtatctg is present or absent.

SEQ ID NO: 5157 - DNA, 44 bp, Homo sapiens; identical to SEQ ID NO: 3001
  misc_feature (21)..(24): ttta is present or absent.

SEQ ID NO: 5158 - DNA, 41 bp, Homo sapiens
  misc_feature (21)..(21): t is present or absent.
ttcrcttatatgcagctttttgtccaaccaaacagaaggag

SEQ ID NO: 5159 - DNA, 40 bp, Homo sapiens
ttcrcttatatgcagcttttgtccaaccaaacagaaggag

SEQ ID NO: 5160 - DNA, 41 bp, Homo sapiens; identical to SEQ ID NO: 3004
  misc_feature (21)..(21): g is present or absent.

SEQ ID NO: 5161 - DNA, 41 bp, Homo sapiens
  misc_feature (21)..(21): a is present or absent.
aatgaagtggaggaaaaaaaatgatttcaagttttctgtct

SEQ ID NO: 5162 - DNA, 51 bp, Homo sapiens
  misc_feature (30)..(31): a is present or absent.
acatccatgtttaacagaataaaaaaaaaaawattttgtaacgacaaaaga

SEQ ID NO: 5163 - DNA, 41 bp, Homo sapiens
  misc_feature (21)..(21): g is present or absent.
agattgtttaaccaaattaggaaactattattcaacacact

SEQ ID NO: 5164 - DNA, 50 bp, Homo sapiens
  misc_feature (29)..(30): at is present or absent.
ttttatatatgaattaaaatatatatatatcatatrtaatcttacctaag

SEQ ID NO: 5165 - DNA, 48 bp, Homo sapiens
  misc_feature (28)..(28): t is present or absent.
attttctatattatgaactgttttttttaagggtagtgaygtgaatag

SEQ ID NO: 5166 - DNA, 63 bp, Homo sapiens
  misc_feature (40)..(43): t is present or absent.
tagtgtgccacccttctctctttttttttttttttttttttttgagatggagtctygctctgt

SEQ ID NO: 5167 - DNA, 41 bp, Homo sapiens
  misc_feature (21)..(21): t is present or absent.
aactcaaaggcttttttttttccatgtgacacatatcctgt

SEQ ID NO: 5168 - DNA, 44 bp, Homo sapiens; identical to SEQ ID NO: 3012
  misc_feature (21)..(24): tgat is present or absent.

SEQ ID NO: 5169 - DNA, 50 bp, Homo sapiens; identical to SEQ ID NO: 3013
  misc_feature (29)..(30): t is present or absent.

SEQ ID NO: 5170 - DNA, 41 bp, Homo sapiens
  misc_feature (21)..(21): a is present or absent.
cctgatgcctttaaaaaaaaatgaaacactttggatgtatt

SEQ ID NO: 5171 - DNA, 41 bp, Homo sapiens; identical to SEQ ID NO: 1

SEQ ID NO: 5172 - DNA, 41 bp, Homo sapiens; identical to SEQ ID NO: 2

SEQ ID NO: 5173 - DNA, 41 bp, Homo sapiens; identical to SEQ ID NO: 3

SEQ ID NO: 5174 - DNA, 41 bp, Homo sapiens; identical to SEQ ID NO: 4

SEQ ID NO: 5175 - DNA, 41 bp, Homo sapiens; identical to SEQ ID NO: 5

SEQ ID NO: 5176 - DNA, 41 bp, Homo sapiens; identical to SEQ ID NO: 6

SEQ ID NO: 5177 - DNA, 41 bp, Homo sapiens; identical to SEQ ID NO: 7

SEQ ID NO: 5178 - DNA, 41 bp, Homo sapiens; identical to SEQ ID NO: 8

SEQ ID NO: 5179 - DNA, 41 bp, Homo sapiens; identical to SEQ ID NO: 9

SEQ ID NO: 5180 - DNA, 41 bp, Homo sapiens; identical to SEQ ID NO: 10

SEQ ID NO: 5181 - DNA, 41 bp, Homo sapiens; identical to SEQ ID NO: 11

SEQ ID NO: 5182 - DNA, 41 bp, Homo sapiens; identical to SEQ ID NO: 12

SEQ ID NO: 5183 - DNA, 41 bp, Homo sapiens; identical to SEQ ID NO: 13

SEQ ID NO: 5184 - DNA, 41 bp, Homo sapiens; identical to SEQ ID NO: 1421

SEQ ID NO: 5185 - DNA, 41 bp, Homo sapiens; identical to SEQ ID NO: 1422

SEQ ID NO: 5186 - DNA, 41 bp, Homo sapiens; identical to SEQ ID NO: 1423

SEQ ID NO: 5187 - DNA, 43 bp, Homo sapiens; identical to SEQ ID NO: 1424
  misc_feature (21)..(23): gtg is present or absent.

SEQ ID NO: 5188 - DNA, 41 bp, Homo sapiens; identical to SEQ ID NO: 1425

SEQ ID NO: 5189 - DNA, 52 bp, Homo sapiens
  misc_feature (21)..(21): n is g or t.
  misc_feature (22)..(22): n is g.
  misc_feature (23)..(23): n is g or absent.
  misc_feature (24)..(24): n is t or absent.
  misc_feature (25)..(28): n is g or absent.
  misc_feature (29)..(29): n is t or absent.
  misc_feature (30)..(31): n is g or absent.
  misc_feature (32)..(32): n is a or absent.
aggtggggtggggtggggtgnnnnnnnnnnnnggctgtctgtgtccaggaaa

SEQ ID NO: 5190 - DNA, 41 bp, Homo sapiens
aggcgagccaggttatgtggygaaggataaggcctcttccc

SEQ ID NO: 5191 - DNA, 41 bp, Homo sapiens
gacaaaaggggaaaaccttcygtgataggcaggtttgtgga

SEQ ID NO: 5192 - DNA, 41 bp, Homo sapiens
cactgtctcccactgggcccrccatgtcactgttaaccaca

SEQ ID NO: 5193 - DNA, 41 bp, Homo sapiens
ccggtttcctaagaaaagccytttctaaaggacccctctta

SEQ ID NO: 5194 - DNA, 41 bp, Homo sapiens
agctttccaaaaagacacttkcggcaccataactccccaaa

SEQ ID NO: 5195 - DNA, 41 bp, Homo sapiens
cttggggcaaacggccactgygtgtgcatggctcttcctgt

SEQ ID NO: 5196 - DNA, 41 bp, Homo sapiens
acataggagacacttctttcrgatctcagtattcagaacaa

SEQ ID NO: 5197 - DNA, 41 bp, Homo sapiens
ctgtgcttctgcgaataagcrgactacttcggatactgtaa

SEQ ID NO: 5198 - DNA, 41 bp, Homo sapiens
agagccagttttggagccccrtctggcaagcaggcaggccc

SEQ ID NO: 5199 - DNA, 41 bp, Homo sapiens
acctctgtctgctgcagaatraggtgtgatataaatatgtg

SEQ ID NO: 5200 - DNA, 41 bp, Homo sapiens
atatttccacaaggtccttgmgtacactgctccatgctttt

SEQ ID NO: 5201 - DNA, 41 bp, Homo sapiens
cttctgtcaagttgccaggayggaaatattccaactctact

SEQ ID NO: 5202 - DNA, 41 bp, Homo sapiens
tccccttcctgcagggggaargagcggggcaagattttctt

SEQ ID NO: 5203 - DNA, 41 bp, Homo sapiens
aagccagagaagctctctccrtgggaatgggaacaaggtgg

SEQ ID NO: 5204 - DNA, 41 bp, Homo sapiens
ggagcctccaagcctcccctrtgtgagcgggtgaggcaggg

SEQ ID NO: 5205 - DNA, 41 bp, Homo sapiens
tatgagactcgttgtgttggrttctcaggtctgaaagttta

SEQ ID NO: 5206 - DNA, 41 bp, Homo sapiens
cctttccccttttctaagtgstgatagtttgaactctaact

SEQ ID NO: 5207 - DNA, 41 bp, Homo sapiens
tttttggaactcacaatttakactagacctcatggttgccc

SEQ ID NO: 5208 - DNA, 41 bp, Homo sapiens
cacctgtctgacgagatagcrcaggtcaggtgggctcactc

SEQ ID NO: 5209 - DNA, 46 bp, Homo sapiens
  misc_feature (21)..(26): acaaca is present or absent.
caacaacaacaacaacaacaacaacattgggagtgtctaacacttc

SEQ ID NO: 5210 - DNA, 53 bp, Homo sapiens
  misc_feature (32)..(33): t is present or absent.
gttctgctcattgctcatgctttttttttttttcaaaaaaagaaactaaggca

SEQ ID NO: 5211 - DNA, 41 bp, Homo sapiens
tgatcattcctagaaaaaagracactcacatttggagagga

SEQ ID NO: 5212 - DNA, 76 bp, Homo sapiens
  misc_feature (51)..(52): ac is present or absent.
  misc_feature (53)..(54): ac is present or absent.
  misc_feature (55)..(56): ac is present or absent.
tcctactctatgatggcagcacacacacacacacacacacacacacacacacacacgatgatcgtcagaactggta

SEQ ID NO: 5213 - DNA, 41 bp, Homo sapiens
acacacacacacacgatgatmgtcagaactggtagatttag

SEQ ID NO: 5214 - DNA, 41 bp, Homo sapiens
attattgatagtaatagaaayacatatttcttaataataag

SEQ ID NO: 5215 - DNA, 41 bp, Homo sapiens
ggtcaggaacatggcggtggrggtcacatccacggcctcca

SEQ ID NO: 5216 - DNA, 41 bp, Homo sapiens
acacacacacctgaaaacatrtatgaattctcaggaaaggt

SEQ ID NO: 5217 - DNA, 41 bp, Homo sapiens
aagcaagatgaggatctgttyttctcctgtgtgagtaaagc

SEQ ID NO: 5218 - DNA, 66 bp, Homo sapiens
  misc_feature (39)..(46): t is present or absent.
gtgaacataatacttagttgttttttttttttttttttttttttttgagtctcatagccctgtgga

SEQ ID NO: 5219 - DNA, 41 bp, Homo sapiens
aaccaaatgattatatgcagwattcctatccagaaaacctt

SEQ ID NO: 5220 - DNA, 41 bp, Homo sapiens
cggcgctagaggagcgagttyggactcggaccccaaggcct

SEQ ID NO: 5221 - DNA, 41 bp, Homo sapiens
gctggcagaggccgggcctckccaggtccccaggacaggcc

SEQ ID NO: 5222 - DNA, 41 bp, Homo sapiens
ggcgccgctctgcctgccagsggggcgcgccttgcggccca

SEQ ID NO: 5223 - DNA, 41 bp, Homo sapiens
ggtggtcagtctggcctcccrtcctgatggccactttgaag

SEQ ID NO: 5224 - DNA, 41 bp, Homo sapiens
atggccctgtgtgtccaggayttactctagttggggttggg

SEQ ID NO: 5225 - DNA, 41 bp, Homo sapiens
catgtggtacctagcagcatrtctgactgttgatacggtca

SEQ ID NO: 5226 - DNA, 41 bp, Homo sapiens
gaagcttggcctcacacacasaggccggcaccctgtcatca

SEQ ID NO: 5227 - DNA, 42 bp, Homo sapiens
  misc_feature (21)..(22): tc is present or absent.
tagtaagaagagccaacaaatcatctgactccgtaattcttg

SEQ ID NO: 5228 - DNA, 41 bp, Homo sapiens
agcaggttatttgtataattmtaaagcttttaactcaagga

SEQ ID NO: 5229 - DNA, 41 bp, Homo sapiens
taatttattgatatccaagtrccctctataatagatgctca

SEQ ID NO: 5230 - DNA, 41 bp, Homo sapiens
caccagaaaggggtcctgtgygcaaaggtcaggcaggagtg

SEQ ID NO: 5231 - DNA, 58 bp, Homo sapiens
  misc_feature (37)..(38): t is present or absent.
ttagcctcctggtttgtgtcttttttttttttttttttaaaacagaatcactctggca

SEQ ID NO: 5232 - DNA, 41 bp, Homo sapiens
tagtcctgactcacacatggktctgtgcttttcgtcctcct

SEQ ID NO: 5233 - DNA, 41 bp, Homo sapiens
ggtggagaacatgaccagttrgaattaactgcagaagctgc

SEQ ID NO: 5234 - DNA, 41 bp, Homo sapiens
gtggagttgtgtgaacaactstttaaaagagtgtggggagg

SEQ ID NO: 5235 - DNA, 41 bp, Homo sapiens
cgtgaactggagagggtctgygggcactgcccggctgagct

SEQ ID NO: 5236 - DNA, 41 bp, Homo sapiens
gcagatggtaaaggagcagaygcggaaagcgacggtcaggg

SEQ ID NO: 5237 - DNA, 41 bp, Homo sapiens
agcgtccagtggtaggaaagkctccacaggtggcaatccca

SEQ ID NO: 5238 - DNA, 41 bp, Homo sapiens
gtcatctctgctcttctcccrcttcttcatttttatagtac

SEQ ID NO: 5239 - DNA, 41 bp, Homo sapiens
cttctcccacttcttcatttktatagtactattggtattat

SEQ ID NO: 5240 - DNA, 41 bp, Homo sapiens
agcctgcccttcccctgcctygtccttgtgaaacagggatc

SEQ ID NO: 5241 - DNA, 41 bp, Homo sapiens
tgagggattacagccccaacrtggggagggcaggctgcact

SEQ ID NO: 5242 - DNA, 41 bp, Homo sapiens
tggtgttcgcaggtgtgtgcyggagtcccctcggtggctgt

SEQ ID NO: 5243 - DNA, 41 bp, Homo sapiens
ggtgtgtgccggagtcccctsggtggctgttatcacaaaaa

SEQ ID NO: 5244 - DNA, 41 bp, Homo sapiens
gaggaagttccattcctcatrtctaaacaccctagagaccc

SEQ ID NO: 5245 - DNA, 41 bp, Homo sapiens
tattgacccaaatctgttctmacaatgtaaatatgactgta

SEQ ID NO: 5246 - DNA, 60 bp, Homo sapiens
  misc_feature (39)..(40): t is present or absent.
tttctccatctgcgaggggcttttttttttttttttttttcttcagtctctgactcatgc

SEQ ID NO: 5247 - DNA, 48 bp, Homo sapiens
  misc_feature (21)..(28): tggtaagt is present or absent.
ttttatctcacctggtaagttggtaagttggtaagttgtctgctttca

SEQ ID NO: 5248 - DNA, 40 bp, Homo sapiens
ttttatctcacctggtaagttggtaagttgtctgctttca

SEQ ID NO: 5249 - DNA, 41 bp, Homo sapiens
  misc_feature (21)..(21): t is present or absent.
gttttcttttcccttttttttcatggagaaagaacagagaa

SEQ ID NO: 5250 - DNA, 40 bp, Homo sapiens
gttttcttttccctttttttcatggagaaagaacagagaa

SEQ ID NO: 5251 - DNA, 41 bp, Homo sapiens
ccaggccaaacaattccattktcatggccactgggccaagg

SEQ ID NO: 5252 - DNA, 41 bp, Homo sapiens
cccttaaccaatgaacgccartggcagatccctcattctga

SEQ ID NO: 5253 - DNA, 41 bp, Homo sapiens
tcagattctttagtaactttsttcacaaaattcttttgaca

SEQ ID NO: 5254 - DNA, 41 bp, Homo sapiens
tgaatgatgtttttcaaatgygtattaaaaatgtcctctct

SEQ ID NO: 5255 - DNA, 41 bp, Homo sapiens
  misc_feature (21)..(21): g is present or absent.
ctttcttagaatcctcttgggcaaaacttctgaggaaggcc

SEQ ID NO: 5256 - DNA, 41 bp, Homo sapiens
  misc_feature (21)..(21): g is present or absent.
tggcagcagaagggaagagggataaaagtggaggcacaggc

SEQ ID NO: 5257 - DNA, 41 bp, Homo sapiens
  misc_feature (21)..(21): c is present or absent.
cctctgtcaaggtaagtactcattattcttcccccaaaggc

SEQ ID NO: 5258 - DNA, 44 bp, Homo sapiens
  misc_feature (21)..(24): ctct is present or absent.
cagcaggcccctaactctctctctgctgatttccacccttcctg

SEQ ID NO: 5259 - DNA, 41 bp, Homo sapiens
atacataattcattacttttrtttgctagaaatgatccaag

SEQ ID NO: 5260 - DNA, 41 bp, Homo sapiens
cattacttttatttgctagamatgatccaagtttctgactt

SEQ ID NO: 5261 - DNA, 41 bp, Homo sapiens
  misc_feature (21)..(21): a is present or absent.
atagaaaaatgctaaaaaaaagttttaaacaaaaataaggg

SEQ ID NO: 5262 - DNA, 41 bp, Homo sapiens
tggaagaggcctttgaatccragcggaggtcacacactcgc

SEQ ID NO: 5263 - DNA, 41 bp, Homo sapiens
caagataattttaggaataaytctgtcgacatgagttatca

SEQ ID NO: 5264 - DNA, 41 bp, Homo sapiens
  misc_feature (21)..(21): t is present or absent.
gttttctggagggttttttttccatctttgtatttttttaa

SEQ ID NO: 5265 - DNA, 41 bp, Homo sapiens
aggcaaacaaaatagaaaaawgtgtgaaaaacagtaaagtt

SEQ ID NO: 5266 - DNA, 41 bp, Homo sapiens
aaacagtaaagttgggagagragcatctattttcttaaaga

SEQ ID NO: 5267 - DNA, 41 bp, Homo sapiens
agaatgtatgtcaagaatttwagataggcctttcagtaaca

SEQ ID NO: 5268 - DNA, 41 bp, Homo sapiens
tatggcatcatgcccctcacrgcctttgtgctgggcaaggt

SEQ ID NO: 5269 - DNA, 41 bp, Homo sapiens
cccagcacccactccagatasgccagccccatctcagccac

SEQ ID NO: 5270 - DNA, 41 bp, Homo sapiens
gcagaaatcagcaagggctcrctcctggagacgcagcacac

SEQ ID NO: 5271 - DNA, 57 bp, Homo sapiens
  misc_feature (35)..(37): t is present or absent.
cacatcacctaacagcttgctttttttttttttttttgagaaataggcatgtaaaga

SEQ ID NO: 5272 - DNA, 41 bp, Homo sapiens
aaggacatattattcaggctstgagtgtcataatttatttt

SEQ ID NO: 5273 - DNA, 41 bp, Homo sapiens
cctatggagaagcaactaccyggggccacttgtctcagcag

SEQ ID NO: 5274 - DNA, 41 bp, Homo sapiens
acacctggagactagcagagscagctttcccaccaggatca

SEQ ID NO: 5275 - DNA, 41 bp, Homo sapiens
gcagaggcagctttcccaccwggatcatatcaaattatgtg

SEQ ID NO: 5276 - DNA, 55 bp, Homo sapiens
  misc_feature (33)..(35): t is present or absent.
gcctcaatggacggtaggtatttttttttttttttaagaaagggtctcactctgt

SEQ ID NO: 5277 - DNA, 53 bp, Homo sapiens
  misc_feature (31)..(33): a is present or absent.
taatataacccagaataaagaaaaaaaaaaaaagattcctcaactctagttac

SEQ ID NO: 5278 - DNA, 66 bp, Homo sapiens
  misc_feature (46)..(47): a is present or absent.
tgcactttaacaccaattttaaaaaaaaaaaaaaaaaaaaaaaaaaacaggacattcaaacccact

SEQ ID NO: 5279 - DNA, 41 bp, Homo sapiens
taaaaaaaaaaaaaaaaaaamaaaaaaacaggacattcaaa

SEQ ID NO: 5280 - DNA, 41 bp, Homo sapiens
ccccagtggaaacactaaatmaaagcaacgtatttctttgg

SEQ ID NO: 5281 - DNA, 41 bp, Homo sapiens
accacggacaagaagaggtasatcaattgggggttggaggg

SEQ ID NO: 5282 - DNA, 41 bp, Homo sapiens
caagacaatatagttttcggrtatcagtttggcaaatgtgc

SEQ ID NO: 5283 - DNA, 41 bp, Homo sapiens
ctgccaggagcacgtcccgcyggcaggtcgcaggagccctg

SEQ ID NO: 5284 - DNA, 41 bp, Homo sapiens
cgagggccgggaggcgcgaarggtacgcggcggcgggaagc

SEQ ID NO: 5285 - DNA, 41 bp, Homo sapiens
aagggtacgcggcggcgggawgcggggcgacccgaaggccc

SEQ ID NO: 5286 - DNA, 41 bp, Homo sapiens
cgaggttgcgatcctggcccrcccgcccgtggggcactgta

SEQ ID NO: 5287 - DNA, 41 bp, Homo sapiens
tggagcgggacgggacccagmgggtgacggcaggggcggca

SEQ ID NO: 5288 - DNA, 41 bp, Homo sapiens
tttagcatttccagcagatcyaatcccgagagctgttagag

SEQ ID NO: 5289 - DNA, 41 bp, Homo sapiens
tcttatatgctgggaagaagygtcagtaagaaaaagcagcc

SEQ ID NO: 5290 - DNA, 41 bp, Homo sapiens
ttgggaagtgccacagccacsgggcacagggacagggtctt

SEQ ID NO: 5291 - DNA, 41 bp, Homo sapiens
agtgccacagccacggggcasagggacagggtcttccacag

SEQ ID NO: 5292 - DNA, 41 bp, Homo sapiens
aaattcacaaaatgtacttcyataagaaggctcgttaaaag

SEQ ID NO: 5293 - DNA, 41 bp, Homo sapiens
ctaggcatttagaacttctayaatctgcccctagtgacaag

SEQ ID NO: 5294 - DNA, 41 bp, Homo sapiens
tggtcatttcaggcctcttcrgcctatgattttagatagtt

SEQ ID NO: 5295 - DNA, 41 bp, Homo sapiens
catgacccatgtaggcgggaraagcagccctgtagcagcag

SEQ ID NO: 5296 - DNA, 41 bp, Homo sapiens
aagaagagcctgtgtttattyagtgattgcaatgtgttggg

SEQ ID NO: 5297 - DNA, 41 bp, Homo sapiens
aaacaccacttctgcatttgmgctttctaagatagcaatcc

SEQ ID NO: 5298 - DNA, 41 bp, Homo sapiens
tttctaagatagcaatcctgytgacacaggtacattaagat

SEQ ID NO: 5299 - DNA, 41 bp, Homo sapiens
  misc_feature (21)..(21): c is present or absent.
agagcgggagtggccataaccagtcctaactttgtttcccc

SEQ ID NO: 5300 - DNA, 41 bp, Homo sapiens
atcctctcttttactggaaamaataaagctacaaaagaacc

SEQ ID NO: 5301 - DNA, 41 bp, Homo sapiens
gctactgttttatgttttccrgatggtaaattattagatgg

SEQ ID NO: 5302 - DNA, 41 bp, Homo sapiens
agtttgcatttgactatcacrctgcattcctgtgagctggc

SEQ ID NO: 5303 - DNA, 41 bp, Homo sapiens
aggcccactgagggaaactgrggaaaagagaggccttctac

SEQ ID NO: 5304 - DNA, 41 bp, Homo sapiens
tgttttcagatcttagtagtrcatggaataggaccgttttc

SEQ ID NO: 5305 - DNA, 41 bp, Homo sapiens
ttaaatattagtggtaaaagraaacatagactcaatctctt

SEQ ID NO: 5306 - DNA, 41 bp, Homo sapiens
ttaaatagtttagacattttygattttctaaagaaaactgc

SEQ ID NO: 5307 - DNA, 41 bp, Homo sapiens
atccataaggtactcagtgaytggcctgtatgaagaactca

SEQ ID NO: 5308 - DNA, 64 bp, Homo sapiens
  misc_feature (41)..(44): t is present or absent.
ctcaaacaggggtagatttcttttttttttttttttttttttttgagtcaagagtctcactctg

SEQ ID NO: 5309 - DNA, 41 bp, Homo sapiens
tgtgagccactgcacctggcyaatttcctgactttctatga

SEQ ID NO: 5310 - DNA, 41 bp, Homo sapiens
tggagagatggtgacacttgscccaatgtctcaagtaagta

SEQ ID NO: 5311 - DNA, 41 bp, Homo sapiens
  misc_feature (21)..(21): t is present or absent.
tttgttgttgggtttttttttgttgttgttgttttgttttg

SEQ ID NO: 5312 - DNA, 41 bp, Homo sapiens
  misc_feature (21)..(21): t is present or absent.
tcactgcagcctccgccccctgggttcaagcaattatcctg

SEQ ID NO: 5313 - DNA, 40 bp, Homo sapiens
tcactgcagcctccgcccccgggttcaagcaattatcctg

SEQ ID NO: 5314 - DNA, 41 bp, Homo sapiens
  misc_feature (21)..(21): g is present or absent.
tatttttagtagagacgggggtttcaccatattggccaggc

SEQ ID NO: 5315 - DNA, 40 bp, Homo sapiens
tatttttagtagagacggggtttcaccatattggccaggc

SEQ ID NO: 5316 - DNA, 41 bp, Homo sapiens
gtgggaattctagctaaggcycgtgtggatctgtctcaggt

SEQ ID NO: 5317 - DNA, 41 bp, Homo sapiens
gacctgagtttaattcatagmcattttctcccagcacctaa

SEQ ID NO: 5318 - DNA, 41 bp, Homo sapiens
gaaaggttaaattattctttrcactgctgaggtgtacacta

SEQ ID NO: 5319 - DNA, 41 bp, Homo sapiens
tcacaaacacttaggacatartatgatttaactagagtgat

SEQ ID NO: 5320 - DNA, 63 bp, Homo sapiens
  misc_feature (39)..(43): t is present or absent.
tcttttttctttttcttttctttttttttttttttttttttttgagacagagttttgctcttg

SEQ ID NO: 5321 - DNA, 41 bp, Homo sapiens
ccacattggtcatcttccctrtcacacaaatgatgttattt

SEQ ID NO: 5322 - DNA, 41 bp, Homo sapiens
aaataaatttctgttcttaarcctaagtgttcatgtatctc

SEQ ID NO: 5323 - DNA, 41 bp, Homo sapiens; identical to SEQ ID NO: 47

SEQ ID NO: 5324 - DNA, 41 bp, Homo sapiens; identical to SEQ ID NO: 48

SEQ ID NO: 5325 - DNA, 41 bp, Homo sapiens; identical to SEQ ID NO: 49

SEQ ID NO: 5326 - DNA, 41 bp, Homo sapiens; identical to SEQ ID NO: 50

SEQ ID NO: 5327 - DNA, 41 bp, Homo sapiens; identical to SEQ ID NO: 51

SEQ ID NO: 5328 - DNA, 41 bp, Homo sapiens; identical to SEQ ID NO: 52

SEQ ID NO: 5329 - DNA, 41 bp, Homo sapiens; identical to SEQ ID NO: 53

SEQ ID NO: 5330 - DNA, 41 bp, Homo sapiens; identical to SEQ ID NO: 54

SEQ ID NO: 5331 - DNA, 41 bp, Homo sapiens; identical to SEQ ID NO: 55

SEQ ID NO: 5332 - DNA, 41 bp, Homo sapiens; identical to SEQ ID NO: 56

SEQ ID NO: 5333 - DNA, 41 bp, Homo sapiens; identical to SEQ ID NO: 57

SEQ ID NO: 5334 - DNA, 41 bp, Homo sapiens; identical to SEQ ID NO: 58

SEQ ID NO: 5335 - DNA, 41 bp, Homo sapiens; identical to SEQ ID NO: 59

SEQ ID NO: 5336 - DNA, 41 bp, Homo sapiens; identical to SEQ ID NO: 60

SEQ ID NO: 5337 - DNA, 41 bp, Homo sapiens; identical to SEQ ID NO: 61

SEQ ID NO: 5338 - DNA, 41 bp, Homo sapiens; identical to SEQ ID NO: 62

SEQ ID NO: 5339 - DNA, 41 bp, Homo sapiens; identical to SEQ ID NO: 63

SEQ ID NO: 5340 - DNA, 41 bp, Homo sapiens; identical to SEQ ID NO: 64
  misc_feature (21)..(21): c is present or absent.

SEQ ID NO: 5341 - DNA, 40 bp, Homo sapiens; identical to SEQ ID NO: 65

SEQ ID NO: 5342 - DNA, 41 bp, Homo sapiens; identical to SEQ ID NO: 66

SEQ ID NO: 5343 - DNA, 41 bp, Homo sapiens; identical to SEQ ID NO: 67

SEQ ID NO: 5344 - DNA, 41 bp, Homo sapiens; identical to SEQ ID NO: 68

SEQ ID NO: 5345 - DNA, 41 bp, Homo sapiens; identical to SEQ ID NO: 69

SEQ ID NO: 5346 - DNA, 41 bp, Homo sapiens; identical to SEQ ID NO: 70

SEQ ID NO: 5347 - DNA, 41 bp, Homo sapiens; identical to SEQ ID NO: 71

SEQ ID NO: 5348 - DNA, 41 bp, Homo sapiens; identical to SEQ ID NO: 72

SEQ ID NO: 5349 - DNA, 41 bp, Homo sapiens; identical to SEQ ID NO: 73

SEQ ID NO: 5350 - DNA, 41 bp, Homo sapiens; identical to SEQ ID NO: 74

SEQ ID NO: 5351 - DNA, 41 bp, Homo sapiens; identical to SEQ ID NO: 75

SEQ ID NO: 5352 - DNA, 41 bp, Homo sapiens; identical to SEQ ID NO: 76

SEQ ID NO: 5353 - DNA, 41 bp, Homo sapiens; identical to SEQ ID NO: 77

SEQ ID NO: 5354 - DNA, 41 bp, Homo sapiens; identical to SEQ ID NO: 78

SEQ ID NO: 5355 - DNA, 41 bp, Homo sapiens; identical to SEQ ID NO: 79

SEQ ID NO: 5356 - DNA, 41 bp, Homo sapiens; identical to SEQ ID NO: 80

SEQ ID NO: 5357 - DNA, 41 bp, Homo sapiens; identical to SEQ ID NO: 81

SEQ ID NO: 5358 - DNA, 41 bp, Homo sapiens; identical to SEQ ID NO: 82

SEQ ID NO: 5359 - DNA, 41 bp, Homo sapiens; identical to SEQ ID NO: 83

SEQ ID NO: 5360 - DNA, 41 bp, Homo sapiens; identical to SEQ ID NO: 84

SEQ ID NO: 5361 - DNA, 41 bp, Homo sapiens; identical to SEQ ID NO: 85

SEQ ID NO: 5362 - DNA, 41 bp, Homo sapiens; identical to SEQ ID NO: 86

SEQ ID NO: 5363 - DNA, 41 bp, Homo sapiens; identical to SEQ ID NO: 87

SEQ ID NO: 5364 - DNA, 41 bp, Homo sapiens; identical to SEQ ID NO: 88

SEQ ID NO: 5365 - DNA, 41 bp, Homo sapiens; identical to SEQ ID NO: 89

SEQ ID NO: 5366 - DNA, 41 bp, Homo sapiens; identical to SEQ ID NO: 90

SEQ ID NO: 5367 - DNA, 41 bp, Homo sapiens; identical to SEQ ID NO: 91

SEQ ID NO: 5368 - DNA, 41 bp, Homo sapiens; identical to SEQ ID NO: 92

SEQ ID NO: 5369 - DNA, 41 bp, Homo sapiens; identical to SEQ ID NO: 93

SEQ ID NO: 5370 - DNA, 41 bp, Homo sapiens; identical to SEQ ID NO: 94

SEQ ID NO: 5371 - DNA, 41 bp, Homo sapiens; identical to SEQ ID NO: 1176

SEQ ID NO: 5372 - DNA, 41 bp, Homo sapiens; identical to SEQ ID NO: 1177

SEQ ID NO: 5373 - DNA, 41 bp, Homo sapiens; identical to SEQ ID NO: 1178

SEQ ID NO: 5374 - DNA, 41 bp, Homo sapiens; identical to SEQ ID NO: 1179

SEQ ID NO: 5375 - DNA, 41 bp, Homo sapiens; identical to SEQ ID NO: 1180

SEQ ID NO: 5376 - DNA, 41 bp, Homo sapiens; identical to SEQ ID NO: 1181

SEQ ID NO: 5377 - DNA, 41 bp, Homo sapiens; identical to SEQ ID NO: 1182

SEQ ID NO: 5378 - DNA, 41 bp, Homo sapiens; identical to SEQ ID NO: 1183

SEQ ID NO: 5379 - DNA, 41 bp, Homo sapiens; identical to SEQ ID NO: 1184

SEQ ID NO: 5380 - DNA, 41 bp, Homo sapiens; identical to SEQ ID NO: 1185

SEQ ID NO: 5381 - DNA, 41 bp, Homo sapiens; identical to SEQ ID NO: 1186

SEQ ID NO: 5382 - DNA, 41 bp, Homo sapiens; identical to SEQ ID NO: 1187

SEQ ID NO: 5383 - DNA, 41 bp, Homo sapiens; identical to SEQ ID NO: 1188

SEQ ID NO: 5384 - DNA, 41 bp, Homo sapiens; identical to SEQ ID NO: 1189

SEQ ID NO: 5385 - DNA, 41 bp, Homo sapiens; identical to SEQ ID NO: 1190

SEQ ID NO: 5386 - DNA, 41 bp, Homo sapiens; identical to SEQ ID NO: 1191

SEQ ID NO: 5387 - DNA, 41 bp, Homo sapiens; identical to SEQ ID NO: 1192

SEQ ID NO: 5388 - DNA, 41 bp, Homo sapiens; identical to SEQ ID NO: 95

SEQ ID NO: 5389 - DNA, 41 bp, Homo sapiens; identical to SEQ ID NO: 1228

SEQ ID NO: 5390 - DNA, 41 bp, Homo sapiens; identical to SEQ ID NO: 96

SEQ ID NO: 5391 - DNA, 41 bp, Homo sapiens; identical to SEQ ID NO: 105

SEQ ID NO: 5392 - DNA, 41 bp, Homo sapiens; identical to SEQ ID NO: 1229

SEQ ID NO: 5393 - DNA, 41 bp, Homo sapiens; identical to SEQ ID NO: 1193

SEQ ID NO: 5394 - DNA, 41 bp, Homo sapiens; identical to SEQ ID NO: 1194

SEQ ID NO: 5395 - DNA, 41 bp, Homo sapiens; identical to SEQ ID NO: 1195

SEQ ID NO: 5396 - DNA, 41 bp, Homo sapiens; identical to SEQ ID NO: 1196

SEQ ID NO: 5397 - DNA, 41 bp, Homo sapiens; identical to SEQ ID NO: 1197

SEQ ID NO: 5398 - DNA, 41 bp, Homo sapiens; identical to SEQ ID NO: 1198

SEQ ID NO: 5399 - DNA, 41 bp, Homo sapiens; identical to SEQ ID NO: 1199

SEQ ID NO: 5400 - DNA, 41 bp, Homo sapiens; identical to SEQ ID NO: 1200
  misc_feature (21)..(21): a is present or absent.

SEQ ID NO: 5401 - DNA, 41 bp, Homo sapiens; identical to SEQ ID NO: 1201

SEQ ID NO: 5402 - DNA, 41 bp, Homo sapiens; identical to SEQ ID NO: 1202

SEQ ID NO: 5403 - DNA, 41 bp, Homo sapiens; identical to SEQ ID NO: 1203

SEQ ID NO: 5404 - DNA, 41 bp, Homo sapiens; identical to SEQ ID NO: 1204
  misc_feature (21)..(21): a is present or absent.

SEQ ID NO: 5405 - DNA, 40 bp, Homo sapiens; identical to SEQ ID NO: 1205

SEQ ID NO: 5406 - DNA, 41 bp, Homo sapiens; identical to SEQ ID NO: 1206

SEQ ID NO: 5407 - DNA, 42 bp, Homo sapiens; identical to SEQ ID NO: 1207
  misc_feature (21)..(22): tt is present or absent.

SEQ ID NO: 5408 - DNA, 40 bp, Homo sapiens; identical to SEQ ID NO: 1208

SEQ ID NO: 5409 - DNA, 41 bp, Homo sapiens; identical to SEQ ID NO: 1209

SEQ ID NO: 5410 - DNA, 42 bp, Homo sapiens; identical to SEQ ID NO: 1210
  misc_feature (21)..(22): at is present or absent.

SEQ ID NO: 5411 - DNA, 40 bp, Homo sapiens; identical to SEQ ID NO: 1211

SEQ ID NO: 5412 - DNA, 41 bp, Homo sapiens; identical to SEQ ID NO: 1212

SEQ ID NO: 5413 - DNA, 41 bp, Homo sapiens; identical to SEQ ID NO: 1213

SEQ ID NO: 5414 - DNA, 41 bp, Homo sapiens; identical to SEQ ID NO: 1214

SEQ ID NO: 5415 - DNA, 41 bp, Homo sapiens; identical to SEQ ID NO: 1215

SEQ ID NO: 5416 - DNA, 41 bp, Homo sapiens; identical to SEQ ID NO: 1216

SEQ ID NO: 5417 - DNA, 41 bp, Homo sapiens; identical to SEQ ID NO: 1217

SEQ ID NO: 5418 - DNA, 41 bp, Homo sapiens; identical to SEQ ID NO: 1218

SEQ ID NO: 5419 - DNA, 41 bp, Homo sapiens; identical to SEQ ID NO: 1219

SEQ ID NO: 5420 - DNA, 41 bp, Homo sapiens; identical to SEQ ID NO: 1220

SEQ ID NO: 5421 - DNA, 41 bp, Homo sapiens; identical to SEQ ID NO: 1221

SEQ ID NO: 5422 - DNA, 41 bp, Homo sapiens; identical to SEQ ID NO: 1222

SEQ ID NO: 5423 - DNA, 41 bp, Homo sapiens; identical to SEQ ID NO: 1223

SEQ ID NO: 5424 - DNA, 41 bp, Homo sapiens; identical to SEQ ID NO: 1224

SEQ ID NO: 5425 - DNA, 41 bp, Homo sapiens; identical to SEQ ID NO: 1225

SEQ ID NO: 5426 - DNA, 41 bp, Homo sapiens; identical to SEQ ID NO: 1226

SEQ ID NO: 5427 - DNA, 41 bp, Homo sapiens; identical to SEQ ID NO: 1227

SEQ ID NO: 5428 - DNA, 41 bp, Homo sapiens; identical to SEQ ID NO: 97

SEQ ID NO: 5429 - DNA, 41 bp, Homo sapiens; identical to SEQ ID NO: 98

SEQ ID NO: 5430 - DNA, 41 bp, Homo sapiens; identical to SEQ ID NO: 99

SEQ ID NO: 5431 - DNA, 41 bp, Homo sapiens; identical to SEQ ID NO: 100

SEQ ID NO: 5432 - DNA, 41 bp, Homo sapiens; identical to SEQ ID NO: 101

SEQ ID NO: 5433 - DNA, 41 bp, Homo sapiens; identical to SEQ ID NO: 102

SEQ ID NO: 5434 - DNA, 41 bp, Homo sapiens; identical to SEQ ID NO: 103

SEQ ID NO: 5435 - DNA, 41 bp, Homo sapiens; identical to SEQ ID NO: 104

SEQ ID NO: 5436 - DNA, 43 bp, Homo sapiens; identical to SEQ ID NO: 1252
  misc_feature (21)..(23): tgt is present or absent.

SEQ ID NO: 5437 - DNA, 41 bp, Homo sapiens; identical to SEQ ID NO: 1253

SEQ ID NO: 5438 - DNA, 41 bp, Homo sapiens; identical to SEQ ID NO: 1254

SEQ ID NO: 5439 - DNA, 41 bp, Homo sapiens; identical to SEQ ID NO: 1255

SEQ ID NO: 5440 - DNA, 41 bp, Homo sapiens; identical to SEQ ID NO: 1256

SEQ ID NO: 5441 - DNA, 41 bp, Homo sapiens; identical to SEQ ID NO: 1257

SEQ ID NO: 5442 - DNA, 41 bp, Homo sapiens; identical to SEQ ID NO: 1258

SEQ ID NO: 5443 - DNA, 41 bp, Homo sapiens; identical to SEQ ID NO: 1259

SEQ ID NO: 5444 - DNA, 41 bp, Homo sapiens; identical to SEQ ID NO: 106

SEQ ID NO: 5445 - DNA, 41 bp, Homo sapiens; identical to SEQ ID NO: 1260
  misc_feature (21)..(21): t is present or absent.

SEQ ID NO: 5446 - DNA, 41 bp, Homo sapiens; identical to SEQ ID NO: 107

SEQ ID NO: 5447 - DNA, 41 bp, Homo sapiens; identical to SEQ ID NO: 108

SEQ ID NO: 5448 - DNA, 41 bp, Homo sapiens; identical to SEQ ID NO: 109

SEQ ID NO: 5449 - DNA, 41 bp, Homo sapiens; identical to SEQ ID NO: 110

SEQ ID NO: 5450 - DNA, 41 bp, Homo sapiens; identical to SEQ ID NO: 111

SEQ ID NO: 5451 - DNA, 41 bp, Homo sapiens; identical to SEQ ID NO: 112

SEQ ID NO: 5452 - DNA, 41 bp, Homo sapiens; identical to SEQ ID NO: 113

SEQ ID NO: 5453 - DNA, 41 bp, Homo sapiens; identical to SEQ ID NO: 114

SEQ ID NO: 5454 - DNA, 41 bp, Homo sapiens; identical to SEQ ID NO: 115

SEQ ID NO: 5455 - DNA, 41 bp, Homo sapiens; identical to SEQ ID NO: 116

SEQ ID NO: 5456 - DNA, 41 bp, Homo sapiens; identical to SEQ ID NO: 117

SEQ ID NO: 5457 - DNA, 41 bp, Homo sapiens; identical to SEQ ID NO: 118

SEQ ID NO: 5458 - DNA, 41 bp, Homo sapiens; identical to SEQ ID NO: 119

SEQ ID NO: 5459 - DNA, 41 bp, Homo sapiens; identical to SEQ ID NO: 120

SEQ ID NO: 5460 - DNA, 41 bp, Homo sapiens; identical to SEQ ID NO: 121

SEQ ID NO: 5461 - DNA, 41 bp, Homo sapiens; identical to SEQ ID NO: 122

SEQ ID NO: 5462 - DNA, 41 bp, Homo sapiens; identical to SEQ ID NO: 123

SEQ ID NO: 5463 - DNA, 41 bp, Homo sapiens; identical to SEQ ID NO: 124

SEQ ID NO: 5464 - DNA, 41 bp, Homo sapiens; identical to SEQ ID NO: 125

SEQ ID NO: 5465 - DNA, 41 bp, Homo sapiens; identical to SEQ ID NO: 126

SEQ ID NO: 5466 - DNA, 41 bp, Homo sapiens; identical to SEQ ID NO: 127

SEQ ID NO: 5467 - DNA, 41 bp, Homo sapiens; identical to SEQ ID NO: 128

SEQ ID NO: 5468 - DNA, 41 bp, Homo sapiens; identical to SEQ ID NO: 129

SEQ ID NO: 5469 - DNA, 41 bp, Homo sapiens; identical to SEQ ID NO: 130

SEQ ID NO: 5470 - DNA, 41 bp, Homo sapiens; identical to SEQ ID NO: 131

SEQ ID NO: 5471 - DNA, 41 bp, Homo sapiens; identical to SEQ ID NO: 132

SEQ ID NO: 5472 - DNA, 41 bp, Homo sapiens; identical to SEQ ID NO: 133

SEQ ID NO: 5473 - DNA, 41 bp, Homo sapiens; identical to SEQ ID NO: 134

SEQ ID NO: 5474 - DNA, 41 bp, Homo sapiens; identical to SEQ ID NO: 135

SEQ ID NO: 5475 - DNA, 41 bp, Homo sapiens; identical to SEQ ID NO: 136

SEQ ID NO: 5476 - DNA, 41 bp, Homo sapiens; identical to SEQ ID NO: 137

SEQ ID NO: 5477 - DNA, 41 bp, Homo sapiens; identical to SEQ ID NO: 138

SEQ ID NO: 5478 - DNA, 41 bp, Homo sapiens; identical to SEQ ID NO: 139

SEQ ID NO: 5479 - DNA, 41 bp, Homo sapiens; identical to SEQ ID NO: 140

SEQ ID NO: 5480 - DNA, 41 bp, Homo sapiens; identical to SEQ ID NO: 141

SEQ ID NO: 5481 - DNA, 41 bp, Homo sapiens; identical to SEQ ID NO: 142

SEQ ID NO: 5482 - DNA, 41 bp, Homo sapiens; identical to SEQ ID NO: 143

SEQ ID NO: 5483 - DNA, 41 bp, Homo sapiens; identical to SEQ ID NO: 144

SEQ ID NO: 5484 - DNA, 41 bp, Homo sapiens; identical to SEQ ID NO: 145

SEQ ID NO: 5485 - DNA, 41 bp, Homo sapiens; identical to SEQ ID NO: 146

SEQ ID NO: 5486 - DNA, 41 bp, Homo sapiens; identical to SEQ ID NO: 147

SEQ ID NO: 5487 - DNA, 41 bp, Homo sapiens; identical to SEQ ID NO: 148

SEQ ID NO: 5488 - DNA, 41 bp, Homo sapiens; identical to SEQ ID NO: 149

SEQ ID NO: 5489 - DNA, 41 bp, Homo sapiens; identical to SEQ ID NO: 150

SEQ ID NO: 5490 - DNA, 41 bp, Homo sapiens; identical to SEQ ID NO: 151

SEQ ID NO: 5491 - DNA, 41 bp, Homo sapiens; identical to SEQ ID NO: 152

SEQ ID NO: 5492 - DNA, 41 bp, Homo sapiens; identical to SEQ ID NO: 153

SEQ ID NO: 5493 - DNA, 41 bp, Homo sapiens; identical to SEQ ID NO: 154

SEQ ID NO: 5494 - DNA, 41 bp, Homo sapiens; identical to SEQ ID NO: 155

SEQ ID NO: 5495 - DNA, 41 bp, Homo sapiens; identical to SEQ ID NO: 156

SEQ ID NO: 5496 - DNA, 41 bp, Homo sapiens; identical to SEQ ID NO: 157

SEQ ID NO: 5497 - DNA, 41 bp, Homo sapiens; identical to SEQ ID NO: 158

SEQ ID NO: 5498 - DNA, 41 bp, Homo sapiens; identical to SEQ ID NO: 159

SEQ ID NO: 5499 - DNA, 41 bp, Homo sapiens; identical to SEQ ID NO: 160

SEQ ID NO: 5500 - DNA, 41 bp, Homo sapiens; identical to SEQ ID NO: 161

SEQ ID NO: 5501 - DNA, 41 bp, Homo sapiens; identical to SEQ ID NO: 162

SEQ ID NO: 5502 - DNA, 41 bp, Homo sapiens; identical to SEQ ID NO: 163

SEQ ID NO: 5503 - DNA, 41 bp, Homo sapiens; identical to SEQ ID NO: 164

SEQ ID NO: 5504 - DNA, 41 bp, Homo sapiens; identical to SEQ ID NO: 165

SEQ ID NO: 5505 - DNA, 41 bp, Homo sapiens; identical to SEQ ID NO: 166

SEQ ID NO: 5506 - DNA, 41 bp, Homo sapiens; identical to SEQ ID NO: 167

SEQ ID NO: 5507 - DNA, 41 bp, Homo sapiens; identical to SEQ ID NO: 168

SEQ ID NO: 5508 - DNA, 41 bp, Homo sapiens; identical to SEQ ID NO: 169

SEQ ID NO: 5509 - DNA, 41 bp, Homo sapiens; identical to SEQ ID NO: 170

SEQ ID NO: 5510 - DNA, 41 bp, Homo sapiens; identical to SEQ ID NO: 171

SEQ ID NO: 5511 - DNA, 41 bp, Homo sapiens; identical to SEQ ID NO: 172

SEQ ID NO: 5512 - DNA, 41 bp, Homo sapiens; identical to SEQ ID NO: 173

SEQ ID NO: 5513 - DNA, 41 bp, Homo sapiens; identical to SEQ ID NO: 174

SEQ ID NO: 5514 - DNA, 41 bp, Homo sapiens; identical to SEQ ID NO: 175

SEQ ID NO: 5515 - DNA, 41 bp, Homo sapiens; identical to SEQ ID NO: 176

SEQ ID NO: 5516 - DNA, 41 bp, Homo sapiens; identical to SEQ ID NO: 177

SEQ ID NO: 5517 - DNA, 41 bp, Homo sapiens; identical to SEQ ID NO: 178

SEQ ID NO: 5518 - DNA, 41 bp, Homo sapiens; identical to SEQ ID NO: 179

SEQ ID NO: 5519 - DNA, 41 bp, Homo sapiens; identical to SEQ ID NO: 180

SEQ ID NO: 5520 - DNA, 41 bp, Homo sapiens; identical to SEQ ID NO: 181

SEQ ID NO: 5521 - DNA, 41 bp, Homo sapiens; identical to SEQ ID NO: 182

SEQ ID NO: 5522 - DNA, 41 bp, Homo sapiens; identical to SEQ ID NO: 183

SEQ ID NO: 5523 - DNA, 41 bp, Homo sapiens; identical to SEQ ID NO: 184

SEQ ID NO: 5524 - DNA, 41 bp, Homo sapiens; identical to SEQ ID NO: 185

SEQ ID NO: 5525 - DNA, 41 bp, Homo sapiens; identical to SEQ ID NO: 186

SEQ ID NO: 5526 - DNA, 41 bp, Homo sapiens; identical to SEQ ID NO: 187

SEQ ID NO: 5527 - DNA, 41 bp, Homo sapiens; identical to SEQ ID NO: 188

SEQ ID NO: 5528 - DNA, 41 bp, Homo sapiens; identical to SEQ ID NO: 189

SEQ ID NO: 5529 - DNA, 41 bp, Homo sapiens; identical to SEQ ID NO: 190

SEQ ID NO: 5530 - DNA, 41 bp, Homo sapiens; identical to SEQ ID NO: 191

SEQ ID NO: 5531 - DNA, 41 bp, Homo sapiens; identical to SEQ ID NO: 192

SEQ ID NO: 5532 - DNA, 41 bp, Homo sapiens; identical to SEQ ID NO: 193

SEQ ID NO: 5533 - DNA, 41 bp, Homo sapiens; identical to SEQ ID NO: 194

SEQ ID NO: 5534 - DNA, 41 bp, Homo sapiens; identical to SEQ ID NO: 1702

SEQ ID NO: 5535 - DNA, 41 bp, Homo sapiens; identical to SEQ ID NO: 1703

SEQ ID NO: 5536 - DNA, 41 bp, Homo sapiens; identical to SEQ ID NO: 1704

SEQ ID NO: 5537 - DNA, 41 bp, Homo sapiens; identical to SEQ ID NO: 1705

SEQ ID NO: 5538 - DNA, 41 bp, Homo sapiens; identical to SEQ ID NO: 1706

SEQ ID NO: 5539 - DNA, 41 bp, Homo sapiens; identical to SEQ ID NO: 1707

SEQ ID NO: 5540 - DNA, 41 bp, Homo sapiens; identical to SEQ ID NO: 1708

SEQ ID NO: 5541 - DNA, 41 bp, Homo sapiens; identical to SEQ ID NO: 1709

SEQ ID NO: 5542 - DNA, 41 bp, Homo sapiens; identical to SEQ ID NO: 1710

SEQ ID NO: 5543 - DNA, 41 bp, Homo sapiens; identical to SEQ ID NO: 1711

SEQ ID NO: 5544 - DNA, 41 bp, Homo sapiens; identical to SEQ ID NO: 1712

SEQ ID NO: 5545 - DNA, 41 bp, Homo sapiens; identical to SEQ ID NO: 1713

SEQ ID NO: 5546 - DNA, 41 bp, Homo sapiens; identical to SEQ ID NO: 1714

SEQ ID NO: 5547 - DNA, 41 bp, Homo sapiens; identical to SEQ ID NO: 1715

SEQ ID NO: 5548 - DNA, 41 bp, Homo sapiens; identical to SEQ ID NO: 1716

SEQ ID NO: 5549 - DNA, 41 bp, Homo sapiens; identical to SEQ ID NO: 1717

SEQ ID NO: 5550 - DNA, 41 bp, Homo sapiens; identical to SEQ ID NO: 1718
  misc_feature (21)..(21): t is present or absent.

SEQ ID NO: 5551 - DNA, 40 bp, Homo sapiens; identical to SEQ ID NO: 1719

SEQ ID NO: 5552 - DNA, 41 bp, Homo sapiens; identical to SEQ ID NO: 1720

SEQ ID NO: 5553 - DNA, 41 bp, Homo sapiens; identical to SEQ ID NO: 1721

SEQ ID NO: 5554 - DNA, 41 bp, Homo sapiens; identical to SEQ ID NO: 1722

SEQ ID NO: 5555 - DNA, 41 bp, Homo sapiens; identical to SEQ ID NO: 3045

SEQ ID NO: 5556 - DNA, 41 bp, Homo sapiens; identical to SEQ ID NO: 3046
  misc_feature (21)..(21): g is present or absent.

SEQ ID NO: 5557 - DNA, 53 bp, Homo sapiens; identical to SEQ ID NO: 3047
  misc_feature (32)..(33): t is present or absent.

SEQ ID NO: 5558 - DNA, 41 bp, Homo sapiens; identical to SEQ ID NO: 3048

SEQ ID NO: 5559 - DNA, 41 bp, Homo sapiens; identical to SEQ ID NO: 3049
  misc_feature (21)..(21): a is present or absent.

SEQ ID NO: 5560 - DNA, 41 bp, Homo sapiens; identical to SEQ ID NO: 3050

SEQ ID NO: 5561 - DNA, 51 bp, Homo sapiens; identical to SEQ ID NO: 3051
  misc_feature (30)..(31): t is present or absent.

SEQ ID NO: 5562 - DNA, 41 bp, Homo sapiens; identical to SEQ ID NO: 3052

SEQ ID NO: 5563 - DNA, 41 bp, Homo sapiens; identical to SEQ ID NO: 3053

SEQ ID NO: 5564 - DNA, 41 bp, Homo sapiens; identical to SEQ ID NO: 3054
  misc_feature (21)..(21): t is present or absent.

SEQ ID NO: 5565 - DNA, 41 bp, Homo sapiens; identical to SEQ ID NO: 3055

SEQ ID NO: 5566 - DNA, 41 bp, Homo sapiens; identical to SEQ ID NO: 3056
  misc_feature (21)..(21): t is present or absent.

SEQ ID NO: 5567 - DNA, 41 bp, Homo sapiens; identical to SEQ ID NO: 3057

SEQ ID NO: 5568 - DNA, 41 bp, Homo sapiens; identical to SEQ ID NO: 3058

SEQ ID NO: 5569 - DNA, 41 bp, Homo sapiens; identical to SEQ ID NO: 3059

SEQ ID NO: 5570 - DNA, 41 bp, Homo sapiens; identical to SEQ ID NO: 3060
  misc_feature (21)..(21): t is present or absent.

SEQ ID NO: 5571 - DNA, 41 bp, Homo sapiens; identical to SEQ ID NO: 3061

SEQ ID NO: 5572 - DNA, 41 bp, Homo sapiens; identical to SEQ ID NO: 3062

SEQ ID NO: 5573 - DNA, 41 bp, Homo sapiens; identical to SEQ ID NO: 3063

SEQ ID NO: 5574 - DNA, 41 bp, Homo sapiens; identical to SEQ ID NO: 3064

SEQ ID NO: 5575 - DNA, 44 bp, Homo sapiens; identical to SEQ ID NO: 3065
  misc_feature (21)..(24): aaga is present or absent.

SEQ ID NO: 5576 - DNA, 40 bp, Homo sapiens; identical to SEQ ID NO: 3066

SEQ ID NO: 5577 - DNA, 41 bp, Homo sapiens; identical to SEQ ID NO: 3067

SEQ ID NO: 5578 - DNA, 41 bp, Homo sapiens; identical to SEQ ID NO: 3068

SEQ ID NO: 5579 - DNA, 44 bp, Homo sapiens; identical to SEQ ID NO: 3069
  misc_feature (21)..(24): aaaa is present or absent.

SEQ ID NO: 5580 - DNA, 41 bp, Homo sapiens; identical to SEQ ID NO: 3070

SEQ ID NO: 5581 - DNA, 41 bp, Homo sapiens; identical to SEQ ID NO: 3071

SEQ ID NO: 5582 - DNA, 41 bp, Homo sapiens; identical to SEQ ID NO: 3072

SEQ ID NO: 5583 - DNA, 51 bp, Homo sapiens; identical to SEQ ID NO: 3073
  misc_feature (30)..(31): t is present or absent.

SEQ ID NO: 5584 - DNA, 41 bp, Homo sapiens; identical to SEQ ID NO: 3074

SEQ ID NO: 5585 - DNA, 41 bp, Homo sapiens; identical to SEQ ID NO: 3075

SEQ ID NO: 5586 - DNA, 41 bp, Homo sapiens; identical to SEQ ID NO: 3076

SEQ ID NO: 5587 - DNA, 41 bp, Homo sapiens; identical to SEQ ID NO: 3077

SEQ ID NO: 5588 - DNA, 41 bp, Homo sapiens; identical to SEQ ID NO: 3078

SEQ ID NO: 5589 - DNA, 41 bp, Homo sapiens; identical to SEQ ID NO: 3079

SEQ ID NO: 5590 - DNA, 41 bp, Homo sapiens; identical to SEQ ID NO: 3080

SEQ ID NO: 5591 - DNA, 41 bp, Homo sapiens; identical to SEQ ID NO: 3081
  misc_feature (21)..(21): a is present or absent.

SEQ ID NO: 5592 - DNA, 41 bp, Homo sapiens; identical to SEQ ID NO: 3082

SEQ ID NO: 5593 - DNA, 41 bp, Homo sapiens; identical to SEQ ID NO: 3083

SEQ ID NO: 5594 - DNA, 41 bp, Homo sapiens; identical to SEQ ID NO: 3084

SEQ ID NO: 5595 - DNA, 41 bp, Homo sapiens; identical to SEQ ID NO: 3085

SEQ ID NO: 5596 - DNA, 41 bp, Homo sapiens; identical to SEQ ID NO: 3086

SEQ ID NO: 5597 - DNA, 41 bp, Homo sapiens; identical to SEQ ID NO: 3087

SEQ ID NO: 5598 - DNA, 41 bp, Homo sapiens; identical to SEQ ID NO: 3088

SEQ ID NO: 5599 - DNA, 41 bp, Homo sapiens; identical to SEQ ID NO: 3089

SEQ ID NO: 5600 - DNA, 41 bp, Homo sapiens; identical to SEQ ID NO: 3090

SEQ ID NO: 5601 - DNA, 41 bp, Homo sapiens; identical to SEQ ID NO: 3091

SEQ ID NO: 5602 - DNA, 41 bp, Homo sapiens; identical to SEQ ID NO: 3092

SEQ ID NO: 5603 - DNA, 41 bp, Homo sapiens; identical to SEQ ID NO: 3093

SEQ ID NO: 5604 - DNA, 41 bp, Homo sapiens; identical to SEQ ID NO: 3094

SEQ ID NO: 5605 - DNA, 41 bp, Homo sapiens; identical to SEQ ID NO: 3095

SEQ ID NO: 5606 - DNA, 41 bp, Homo sapiens
tggaaagttctggggacttastatctctccatttctcttcc

SEQ ID NO: 5607 - DNA, 41 bp, Homo sapiens; identical to SEQ ID NO: 3096

SEQ ID NO: 5608 - DNA, 41 bp, Homo sapiens; identical to SEQ ID NO: 3097

SEQ ID NO: 5609 - DNA, 41 bp, Homo sapiens; identical to SEQ ID NO: 3098

SEQ ID NO: 5610 - DNA, 41 bp, Homo sapiens; identical to SEQ ID NO: 3099

SEQ ID NO: 5611 - DNA, 41 bp, Homo sapiens; identical to SEQ ID NO: 3100

SEQ ID NO: 5612 - DNA, 41 bp, Homo sapiens; identical to SEQ ID NO: 3101

SEQ ID NO: 5613 - DNA, 41 bp, Homo sapiens; identical to SEQ ID NO: 3102

SEQ ID NO: 5614 - DNA, 53 bp, Homo sapiens; identical to SEQ ID NO: 3103
  misc_feature (32)..(33): t is present or absent.

SEQ ID NO: 5615 - DNA, 41 bp, Homo sapiens; identical to SEQ ID NO: 3104

SEQ ID NO: 5616 - DNA, 41 bp, Homo sapiens; identical to SEQ ID NO: 3105

SEQ ID NO: 5617 - DNA, 41 bp, Homo sapiens; identical to SEQ ID NO: 3106

SEQ ID NO: 5618 - DNA, 41 bp, Homo sapiens; identical to SEQ ID NO: 3107

SEQ ID NO: 5619 - DNA, 41 bp, Homo sapiens; identical to SEQ ID NO: 3108

SEQ ID NO: 5620 - DNA, 41 bp, Homo sapiens; identical to SEQ ID NO: 3109

SEQ ID NO: 5621 - DNA, 41 bp, Homo sapiens; identical to SEQ ID NO: 3110

SEQ ID NO: 5622 - DNA, 41 bp, Homo sapiens; identical to SEQ ID NO: 3111

SEQ ID NO: 5623 - DNA, 41 bp, Homo sapiens; identical to SEQ ID NO: 3112

SEQ ID NO: 5624 - DNA, 41 bp, Homo sapiens; identical to SEQ ID NO: 3113

SEQ ID NO: 5625 - DNA, 41 bp, Homo sapiens; identical to SEQ ID NO: 3114

SEQ ID NO: 5626 - DNA, 41 bp, Homo sapiens; identical to SEQ ID NO: 3115

SEQ ID NO: 5627 - DNA, 41 bp, Homo sapiens; identical to SEQ ID NO: 3116

SEQ ID NO: 5628 - DNA, 41 bp, Homo sapiens; identical to SEQ ID NO: 3117

SEQ ID NO: 5629 - DNA, 41 bp, Homo sapiens; identical to SEQ ID NO: 3118

SEQ ID NO: 5630 - DNA, 44 bp, Homo sapiens; identical to SEQ ID NO: 3119
  misc_feature (21)..(24): acta is present or absent.

SEQ ID NO: 5631 - DNA, 40 bp, Homo sapiens; identical to SEQ ID NO: 3120

SEQ ID NO: 5632 - DNA, 41 bp, Homo sapiens; identical to SEQ ID NO: 3121

SEQ ID NO: 5633 - DNA, 41 bp, Homo sapiens; identical to SEQ ID NO: 3122

SEQ ID NO: 5634 - DNA, 41 bp, Homo sapiens; identical to SEQ ID NO: 3123

SEQ ID NO: 5635 - DNA, 41 bp, Homo sapiens; identical to SEQ ID NO: 3124

SEQ ID NO: 5636 - DNA, 43 bp, Homo sapiens; identical to SEQ ID NO: 3125
  misc_feature (21)..(21): gtg is present or absent.

SEQ ID NO: 5637 - DNA, 41 bp, Homo sapiens; identical to SEQ ID NO: 3126

SEQ ID NO: 5638 - DNA, 41 bp, Homo sapiens; identical to SEQ ID NO: 3127

SEQ ID NO: 5639 - DNA, 41 bp, Homo sapiens; identical to SEQ ID NO: 3128

SEQ ID NO: 5640 - DNA, 41 bp, Homo sapiens; identical to SEQ ID NO: 3129

SEQ ID NO: 5641 - DNA, 52 bp, Homo sapiens; identical to SEQ ID NO: 3130
  misc_feature (32)..(32): t is present or absent.

SEQ ID NO: 5642 - DNA, 41 bp, Homo sapiens; identical to SEQ ID NO: 3131

SEQ ID NO: 5643 - DNA, 41 bp, Homo sapiens; identical to SEQ ID NO: 3132

SEQ ID NO: 5644 - DNA, 41 bp, Homo sapiens; identical to SEQ ID NO: 3133

SEQ ID NO: 5645 - DNA, 41 bp, Homo sapiens; identical to SEQ ID NO: 3134

SEQ ID NO: 5646 - DNA, 41 bp, Homo sapiens; identical to SEQ ID NO: 3135

SEQ ID NO: 5647 - DNA, 41 bp, Homo sapiens; identical to SEQ ID NO: 3136

SEQ ID NO: 5648 - DNA, 41 bp, Homo sapiens; identical to SEQ ID NO: 3137

SEQ ID NO: 5649 - DNA, 41 bp, Homo sapiens; identical to SEQ ID NO: 3138

SEQ ID NO: 5650 - DNA, 41 bp, Homo sapiens; identical to SEQ ID NO: 3139

SEQ ID NO: 5651 - DNA, 43 bp, Homo sapiens; identical to SEQ ID NO: 3140
  misc_feature (21)..(23): tta is present or absent.

SEQ ID NO: 5652 - DNA, 41 bp, Homo sapiens; identical to SEQ ID NO: 3141

SEQ ID NO: 5653 - DNA, 41 bp, Homo sapiens; identical to SEQ ID NO: 3142

SEQ ID NO: 5654 - DNA, 41 bp, Homo sapiens; identical to SEQ ID NO: 3143

SEQ ID NO: 5655 - DNA, 41 bp, Homo sapiens; identical to SEQ ID NO: 3144

SEQ ID NO: 5656 - DNA, 41 bp, Homo sapiens; identical to SEQ ID NO: 3145

SEQ ID NO: 5657 - DNA, 41 bp, Homo sapiens; identical to SEQ ID NO: 3146

SEQ ID NO: 5658 - DNA, 41 bp, Homo sapiens; identical to SEQ ID NO: 3147

SEQ ID NO: 5659 - DNA, 41 bp, Homo sapiens; identical to SEQ ID NO: 3148

SEQ ID NO: 5660 - DNA, 41 bp, Homo sapiens; identical to SEQ ID NO: 3149

SEQ ID NO: 5661 - DNA, 41 bp, Homo sapiens; identical to SEQ ID NO: 3150

SEQ ID NO: 5662 - DNA, 41 bp, Homo sapiens; identical to SEQ ID NO: 3151

SEQ ID NO: 5663 - DNA, 41 bp, Homo sapiens; identical to SEQ ID NO: 3152

SEQ ID NO: 5664 - DNA, 41 bp, Homo sapiens; identical to SEQ ID NO: 3153

SEQ ID NO: 5665 - DNA, 41 bp, Homo sapiens; identical to SEQ ID NO: 3154
  misc_feature (21)..(21): g is present or absent.

SEQ ID NO: 5666 - DNA, 40 bp, Homo sapiens; identical to SEQ ID NO: 3155

SEQ ID NO: 5667 - DNA, 41 bp, Homo sapiens; identical to SEQ ID NO: 3156
  misc_feature (21)..(21): a is present or absent.

SEQ ID NO: 5668 - DNA, 40 bp, Homo sapiens; identical to SEQ ID NO: 3157

SEQ ID NO: 5669 - DNA, 43 bp, Homo sapiens; identical to SEQ ID NO: 3158
  misc_feature (21)..(23): cct is present or absent.

SEQ ID NO: 5670 - DNA, 41 bp, Homo sapiens; identical to SEQ ID NO: 3159

SEQ ID NO: 5671 - DNA, 41 bp, Homo sapiens; identical to SEQ ID NO: 3160

SEQ ID NO: 5672 - DNA, 41 bp, Homo sapiens; identical to SEQ ID NO: 3161

SEQ ID NO: 5673 - DNA, 41 bp, Homo sapiens; identical to SEQ ID NO: 3162

SEQ ID NO: 5674 - DNA, 41 bp, Homo sapiens; identical to SEQ ID NO: 3163

SEQ ID NO: 5675 - DNA, 41 bp, Homo sapiens; identical to SEQ ID NO: 3164

SEQ ID NO: 5676 - DNA, 41 bp, Homo sapiens; identical to SEQ ID NO: 3165

SEQ ID NO: 5677 - DNA, 41 bp, Homo sapiens; identical to SEQ ID NO: 3166

SEQ ID NO: 5678 - DNA, 41 bp, Homo sapiens; identical to SEQ ID NO: 3167

SEQ ID NO: 5679 - DNA, 41 bp, Homo sapiens; identical to SEQ ID NO: 3168

SEQ ID NO: 5680 - DNA, 43 bp, Homo sapiens; identical to SEQ ID NO: 3169
  misc_feature (21)..(23): gga is present or absent.

SEQ ID NO: 5681 - DNA, 40 bp, Homo sapiens; identical to SEQ ID NO: 3170

SEQ ID NO: 5682 - DNA, 41 bp, Homo sapiens; identical to SEQ ID NO: 3171

SEQ ID NO: 5683 - DNA, 41 bp, Homo sapiens; identical to SEQ ID NO: 3172

SEQ ID NO: 5684 - DNA, 41 bp, Homo sapiens; identical to SEQ ID NO: 3173

SEQ ID NO: 5685 - DNA, 41 bp, Homo sapiens; identical to SEQ ID NO: 3174

SEQ ID NO: 5686 - DNA, 41 bp, Homo sapiens; identical to SEQ ID NO: 3175

SEQ ID NO: 5687 - DNA, 41 bp, Homo sapiens; identical to SEQ ID NO: 3176

SEQ ID NO: 5688 - DNA, 41 bp, Homo sapiens; identical to SEQ ID NO: 3177

SEQ ID NO: 5689 - DNA, 41 bp, Homo sapiens; identical to SEQ ID NO: 3178

SEQ ID NO: 5690 - DNA, 54 bp, Homo sapiens; identical to SEQ ID NO: 3179
  misc_feature (33)..(34): t is present or absent.

SEQ ID NO: 5691 - DNA, 41 bp, Homo sapiens; identical to SEQ ID NO: 3180

SEQ ID NO: 5692 - DNA, 41 bp, Homo sapiens; identical to SEQ ID NO: 3181

SEQ ID NO: 5693 - DNA, 41 bp, Homo sapiens; identical to SEQ ID NO: 3182

SEQ ID NO: 5694 - DNA, 41 bp, Homo sapiens; identical to SEQ ID NO: 3183

SEQ ID NO: 5695 - DNA, 57 bp, Homo sapiens; identical to SEQ ID NO: 3184
  misc_feature (37)..(37): t is present or absent.

SEQ ID NO: 5696 - DNA, 41 bp, Homo sapiens; identical to SEQ ID NO: 3185

SEQ ID NO: 5697 - DNA, 41 bp, Homo sapiens; identical to SEQ ID NO: 3186

SEQ ID NO: 5698 - DNA, 41 bp, Homo sapiens; identical to SEQ ID NO: 3187

SEQ ID NO: 5699 - DNA, 41 bp, Homo sapiens; identical to SEQ ID NO: 3188

SEQ ID NO: 5700 - DNA, 41 bp, Homo sapiens; identical to SEQ ID NO: 3189

SEQ ID NO: 5701 - DNA, 41 bp, Homo sapiens; identical to SEQ ID NO: 3190

SEQ ID NO: 5702 - DNA, 41 bp, Homo sapiens; identical to SEQ ID NO: 3191

SEQ ID NO: 5703 - DNA, 41 bp, Homo sapiens; identical to SEQ ID NO: 3192

SEQ ID NO: 5704 - DNA, 41 bp, Homo sapiens; identical to SEQ ID NO: 3193

SEQ ID NO: 5705 - DNA, 41 bp, Homo sapiens; identical to SEQ ID NO: 3194

SEQ ID NO: 5706 - DNA, 41 bp, Homo sapiens; identical to SEQ ID NO: 3195

SEQ ID NO: 5707 - DNA, 41 bp, Homo sapiens; identical to SEQ ID NO: 3196
  misc_feature (21)..(21): g is present or absent.

SEQ ID NO: 5708 - DNA, 40 bp, Homo sapiens; identical to SEQ ID NO: 3197

SEQ ID NO: 5709 - DNA, 41 bp, Homo sapiens; identical to SEQ ID NO: 3198

SEQ ID NO: 5710 - DNA, 41 bp, Homo sapiens; identical to SEQ ID NO: 3199

SEQ ID NO: 5711 - DNA, 41 bp, Homo sapiens; identical to SEQ ID NO: 3200

SEQ ID NO: 5712 - DNA, 41 bp, Homo sapiens; identical to SEQ ID NO: 3201

SEQ ID NO: 5713 - DNA, 41 bp, Homo sapiens; identical to SEQ ID NO: 3202

SEQ ID NO: 5714 - DNA, 41 bp, Homo sapiens; identical to SEQ ID NO: 3203

SEQ ID NO: 5715 - DNA, 41 bp, Homo sapiens; identical to SEQ ID NO: 3204

SEQ ID NO: 5716 - DNA, 41 bp, Homo sapiens; identical to SEQ ID NO: 3205

SEQ ID NO: 5717 - DNA, 41 bp, Homo sapiens; identical to SEQ ID NO: 3206

SEQ ID NO: 5718 - DNA, 41 bp, Homo sapiens; identical to SEQ ID NO: 3207

SEQ ID NO: 5719 - DNA, 41 bp, Homo sapiens; identical to SEQ ID NO: 3208

SEQ ID NO: 5720 - DNA, 41 bp, Homo sapiens; identical to SEQ ID NO: 3209

SEQ ID NO: 5721 - DNA, 41 bp, Homo sapiens; identical to SEQ ID NO: 3210

SEQ ID NO: 5722 - DNA, 41 bp, Homo sapiens; identical to SEQ ID NO: 3211

SEQ ID NO: 5723 - DNA, 41 bp, Homo sapiens; identical to SEQ ID NO: 3212

SEQ ID NO: 5724 - DNA, 41 bp, Homo sapiens; identical to SEQ ID NO: 3213

SEQ ID NO: 5725 - DNA, 41 bp, Homo sapiens; identical to SEQ ID NO: 3214

SEQ ID NO: 5726 - DNA, 41 bp, Homo sapiens; identical to SEQ ID NO: 3215

SEQ ID NO: 5727 - DNA, 41 bp, Homo sapiens; identical to SEQ ID NO: 3216

SEQ ID NO: 5728 - DNA, 41 bp, Homo sapiens; identical to SEQ ID NO: 3217

SEQ ID NO: 5729 - DNA, 41 bp, Homo sapiens; identical to SEQ ID NO: 3218

SEQ ID NO: 5730 - DNA, 41 bp, Homo sapiens; identical to SEQ ID NO: 3219

SEQ ID NO: 5731 - DNA, 41 bp, Homo sapiens; identical to SEQ ID NO: 3220

SEQ ID NO: 5732 - DNA, 41 bp, Homo sapiens; identical to SEQ ID NO: 3221

SEQ ID NO: 5733 - DNA, 41 bp, Homo sapiens; identical to SEQ ID NO: 3222

SEQ ID NO: 5734 - DNA, 41 bp, Homo sapiens; identical to SEQ ID NO: 3223

SEQ ID NO: 5735 - DNA, 41 bp, Homo sapiens; identical to SEQ ID NO: 3224

SEQ ID NO: 5736 - DNA, 41 bp, Homo sapiens; identical to SEQ ID NO: 3225

SEQ ID NO: 5737 - DNA, 41 bp, Homo sapiens; identical to SEQ ID NO: 3226

SEQ ID NO: 5738 - DNA, 41 bp, Homo sapiens; identical to SEQ ID NO: 3227

SEQ ID NO: 5739 - DNA, 41 bp, Homo sapiens
gggccttggttggggcctttktgtggctctcttttgagatt

SEQ ID NO: 5740 - DNA, 41 bp, Homo sapiens
  misc_feature (21)..(21): c is present or absent.
gtccccctcccacctcagtcctgctttgtagtccatccctg

SEQ ID NO: 5741 - DNA, 41 bp, Homo sapiens; identical to SEQ ID NO: 3228

SEQ ID NO: 5742 - DNA, 41 bp, Homo sapiens; identical to SEQ ID NO: 3229

SEQ ID NO: 5743 - DNA, 41 bp, Homo sapiens; identical to SEQ ID NO: 3230

SEQ ID NO: 5744 - DNA, 41 bp, Homo sapiens; identical to SEQ ID NO: 3231

SEQ ID NO: 5745 - DNA, 41 bp, Homo sapiens; identical to SEQ ID NO: 3232

SEQ ID NO: 5746 - DNA, 41 bp, Homo sapiens; identical to SEQ ID NO: 3233

SEQ ID NO: 5747 - DNA, 41 bp, Homo sapiens; identical to SEQ ID NO: 3234

SEQ ID NO: 5748 - DNA, 41 bp, Homo sapiens; identical to SEQ ID NO: 3235

SEQ ID NO: 5749 - DNA, 41 bp, Homo sapiens; identical to SEQ ID NO: 196

SEQ ID NO: 5750 - DNA, 41 bp, Homo sapiens; identical to SEQ ID NO: 197

SEQ ID NO: 5751 - DNA, 41 bp, Homo sapiens; identical to SEQ ID NO: 198

SEQ ID NO: 5752 - DNA, 41 bp, Homo sapiens; identical to SEQ ID NO: 199

SEQ ID NO: 5753 - DNA, 41 bp, Homo sapiens; identical to SEQ ID NO: 200

SEQ ID NO: 5754 - DNA, 41 bp, Homo sapiens; identical to SEQ ID NO: 201

SEQ ID NO: 5755 - DNA, 41 bp, Homo sapiens; identical to SEQ ID NO: 202

SEQ ID NO: 5756 - DNA, 41 bp, Homo sapiens; identical to SEQ ID NO: 203

SEQ ID NO: 5757 - DNA, 41 bp, Homo sapiens; identical to SEQ ID NO: 204

SEQ ID NO: 5758 - DNA, 41 bp, Homo sapiens; identical to SEQ ID NO: 205

SEQ ID NO: 5759 - DNA, 41 bp, Homo sapiens; identical to SEQ ID NO: 3236

SEQ ID NO: 5760 - DNA, 41 bp, Homo sapiens; identical to SEQ ID NO: 3237

SEQ ID NO: 5761 - DNA, 41 bp, Homo sapiens; identical to SEQ ID NO: 3238

SEQ ID NO: 5762 - DNA, 41 bp, Homo sapiens; identical to SEQ ID NO: 3239

SEQ ID NO: 5763 - DNA, 41 bp, Homo sapiens; identical to SEQ ID NO: 3240

SEQ ID NO: 5764 - DNA, 41 bp, Homo sapiens; identical to SEQ ID NO: 3241

SEQ ID NO: 5765 - DNA, 41 bp, Homo sapiens; identical to SEQ ID NO: 3242

SEQ ID NO: 5766 - DNA, 41 bp, Homo sapiens; identical to SEQ ID NO: 3243

SEQ ID NO: 5767 - DNA, 41 bp, Homo sapiens; identical to SEQ ID NO: 3244

SEQ ID NO: 5768 - DNA, 41 bp, Homo sapiens; identical to SEQ ID NO: 3245

SEQ ID NO: 5769 - DNA, 41 bp, Homo sapiens; identical to SEQ ID NO: 3246

SEQ ID NO: 5770 - DNA, 41 bp, Homo sapiens; identical to SEQ ID NO: 3247

SEQ ID NO: 5771 - DNA, 41 bp, Homo sapiens; identical to SEQ ID NO: 3248

SEQ ID NO: 5772 - DNA, 41 bp, Homo sapiens; identical to SEQ ID NO: 3249

SEQ ID NO: 5773 - DNA, 41 bp, Homo sapiens; identical to SEQ ID NO: 3250

SEQ ID NO: 5774 - DNA, 41 bp, Homo sapiens; identical to SEQ ID NO: 3251

SEQ ID NO: 5775 - DNA, 41 bp, Homo sapiens; identical to SEQ ID NO: 3252

SEQ ID NO: 5776 - DNA, 41 bp, Homo sapiens; identical to SEQ ID NO: 3253

SEQ ID NO: 5777 - DNA, 41 bp, Homo sapiens; identical to SEQ ID NO: 3254

SEQ ID NO: 5778 - DNA, 41 bp, Homo sapiens; identical to SEQ ID NO: 3255

SEQ ID NO: 5779 - DNA, 41 bp, Homo sapiens; identical to SEQ ID NO: 3256

SEQ ID NO: 5780 - DNA, 41 bp, Homo sapiens; identical to SEQ ID NO: 3257

SEQ ID NO: 5781 - DNA, 41 bp, Homo sapiens; identical to SEQ ID NO: 3258

SEQ ID NO: 5782 - DNA, 41 bp, Homo sapiens; identical to SEQ ID NO: 3259

SEQ ID NO: 5783 - DNA, 41 bp, Homo sapiens; identical to SEQ ID NO: 3260

SEQ ID NO: 5784 - DNA, 41 bp, Homo sapiens; identical to SEQ ID NO: 3261

SEQ ID NO: 5785 - DNA, 41 bp, Homo sapiens; identical to SEQ ID NO: 3262

SEQ ID NO: 5786 - DNA, 41 bp, Homo sapiens; identical to SEQ ID NO: 3263

SEQ ID NO: 5787 - DNA, 41 bp, Homo sapiens; identical to SEQ ID NO: 3264

SEQ ID NO: 5788 - DNA, 41 bp, Homo sapiens; identical to SEQ ID NO: 3265

SEQ ID NO: 5789 - DNA, 41 bp, Homo sapiens; identical to SEQ ID NO: 3266

SEQ ID NO: 5790 - DNA, 41 bp, Homo sapiens; identical to SEQ ID NO: 3267

SEQ ID NO: 5791 - DNA, 41 bp, Homo sapiens
tcaggtttgcatttgttcacygtgcacattcagagttccag

SEQ ID NO: 5792 - DNA, 41 bp, Homo sapiens
gctcaagtcctcctctagctsttcaccgtgcagccccctaa

SEQ ID NO: 5793 - DNA, 41 bp, Homo sapiens
ggtggaggggcctggcctgtkgctgttcaggagaacgctcc

SEQ ID NO: 5794 - DNA, 41 bp, Homo sapiens
ctgtggctgttcaggagaacrctccaagagcctgctgtggg

SEQ ID NO: 5795 - DNA, 41 bp, Homo sapiens; identical to SEQ ID NO: 3268

SEQ ID NO: 5796 - DNA, 41 bp, Homo sapiens; identical to SEQ ID NO: 3269

SEQ ID NO: 5797 - DNA, 41 bp, Homo sapiens; identical to SEQ ID NO: 3270

SEQ ID NO: 5798 - DNA, 41 bp, Homo sapiens; identical to SEQ ID NO: 3271

SEQ ID NO: 5799 - DNA, 41 bp, Homo sapiens; identical to SEQ ID NO: 3272

SEQ ID NO: 5800 - DNA, 42 bp, Homo sapiens; identical to SEQ ID NO: 3273
  misc_feature (21)..(22): ag is present or absent.

SEQ ID NO: 5801 - DNA, 40 bp, Homo sapiens; identical to SEQ ID NO: 3274

SEQ ID NO: 5802 - DNA, 41 bp, Homo sapiens; identical to SEQ ID NO: 3275

SEQ ID NO: 5803 - DNA, 41 bp, Homo sapiens; identical to SEQ ID NO: 3276

SEQ ID NO: 5804 - DNA, 41 bp, Homo sapiens; identical to SEQ ID NO: 3277

SEQ ID NO: 5805 - DNA, 41 bp, Homo sapiens; identical to SEQ ID NO: 3278

SEQ ID NO: 5806 - DNA, 41 bp, Homo sapiens
  misc_feature (21)..(21): g is present or absent.
ctgggcagtggcacgggggggacttctgtggaggccctttt

SEQ ID NO: 5807 - DNA, 41 bp, Homo sapiens
  misc_feature (21)..(21): a is present or absent.
ctattaaaaaaaaaaaaaaantttaagccagggagaaaggg

SEQ ID NO: 5808 - DNA, 41 bp, Homo sapiens; identical to SEQ ID NO: 3279

SEQ ID NO: 5809 - DNA, 41 bp, Homo sapiens; identical to SEQ ID NO: 3280

SEQ ID NO: 5810 - DNA, 41 bp, Homo sapiens; identical to SEQ ID NO: 3281

SEQ ID NO: 5811 - DNA, 41 bp, Homo sapiens; identical to SEQ ID NO: 3282

SEQ ID NO: 5812 - DNA, 41 bp, Homo sapiens; identical to SEQ ID NO: 3283

SEQ ID NO: 5813 - DNA, 41 bp, Homo sapiens; identical to SEQ ID NO: 3284

SEQ ID NO: 5814 - DNA, 41 bp, Homo sapiens; identical to SEQ ID NO: 3285

SEQ ID NO: 5815 - DNA, 41 bp, Homo sapiens; identical to SEQ ID NO: 3286

SEQ ID NO: 5816 - DNA, 41 bp, Homo sapiens; identical to SEQ ID NO: 3287

SEQ ID NO: 5817 - DNA, 41 bp, Homo sapiens; identical to SEQ ID NO: 3288

SEQ ID NO: 5818 - DNA, 41 bp, Homo sapiens; identical to SEQ ID NO: 3289

SEQ ID NO: 5819 - DNA, 41 bp, Homo sapiens; identical to SEQ ID NO: 3290

SEQ ID NO: 5820 - DNA, 41 bp, Homo sapiens; identical to SEQ ID NO: 3291

SEQ ID NO: 5821 - DNA, 41 bp, Homo sapiens; identical to SEQ ID NO: 3292

SEQ ID NO: 5822 - DNA, 41 bp, Homo sapiens; identical to SEQ ID NO: 3293

SEQ ID NO: 5823 - DNA, 41 bp, Homo sapiens; identical to SEQ ID NO: 3294

SEQ ID NO: 5824 - DNA, 41 bp, Homo sapiens; identical to SEQ ID NO: 3295

SEQ ID NO: 5825 - DNA, 41 bp, Homo sapiens; identical to SEQ ID NO: 3296

SEQ ID NO: 5826 - DNA, 41 bp, Homo sapiens; identical to SEQ ID NO: 3297

SEQ ID NO: 5827 - DNA, 41 bp, Homo sapiens; identical to SEQ ID NO: 3298

SEQ ID NO: 5828 - DNA, 41 bp, Homo sapiens; identical to SEQ ID NO: 3299

SEQ ID NO: 5829 - DNA, 41 bp, Homo sapiens; identical to SEQ ID NO: 3300

SEQ ID NO: 5830 - DNA, 41 bp, Homo sapiens; identical to SEQ ID NO: 3301

SEQ ID NO: 5831 - DNA, 41 bp, Homo sapiens; identical to SEQ ID NO: 3302

SEQ ID NO: 5832 - DNA, 41 bp, Homo sapiens; identical to SEQ ID NO: 3303

SEQ ID NO: 5833 - DNA, 41 bp, Homo sapiens; identical to SEQ ID NO: 3304

SEQ ID NO: 5834 - DNA, 41 bp, Homo sapiens; identical to SEQ ID NO: 3305

SEQ ID NO: 5835 - DNA, 41 bp, Homo sapiens; identical to SEQ ID NO: 3306
  misc_feature (21)..(21): g is present or absent.

SEQ ID NO: 5836 - DNA, 40 bp, Homo sapiens; identical to SEQ ID NO: 3307

SEQ ID NO: 5837 - DNA, 41 bp, Homo sapiens; identical to SEQ ID NO: 3308

SEQ ID NO: 5838 - DNA, 41 bp, Homo sapiens; identical to SEQ ID NO: 3309

SEQ ID NO: 5839 - DNA, 41 bp, Homo sapiens; identical to SEQ ID NO: 3310
  misc_feature (21)..(21): c is present or absent.

SEQ ID NO: 5840 - DNA, 40 bp, Homo sapiens; identical to SEQ ID NO: 3311

SEQ ID NO: 5841 - DNA, 41 bp, Homo sapiens; identical to SEQ ID NO: 3312

SEQ ID NO: 5842 - DNA, 41 bp, Homo sapiens; identical to SEQ ID NO: 3313

SEQ ID NO: 5843 - DNA, 41 bp, Homo sapiens; identical to SEQ ID NO: 3314

SEQ ID NO: 5844 - DNA, 42 bp, Homo sapiens; identical to SEQ ID NO: 3315
  misc_feature (21)..(22): ct is present or absent.

SEQ ID NO: 5845 - DNA, 41 bp, Homo sapiens; identical to SEQ ID NO: 3316

SEQ ID NO: 5846 - DNA, 42 bp, Homo sapiens; identical to SEQ ID NO: 3317
  misc_feature (21)..(22): gc is present or absent.

SEQ ID NO: 5847 - DNA, 41 bp, Homo sapiens; identical to SEQ ID NO: 3318

SEQ ID NO: 5848 - DNA, 41 bp, Homo sapiens
ccaccagatttatccactcarccacacctggaagagcaggc

SEQ ID NO: 5849 - DNA, 41 bp, Homo sapiens
  misc_feature (21)..(21): c is present or absent.
atgggccatcctgagtcccccttgggaggtttgtaatgcct

SEQ ID NO: 5850 - DNA, 40 bp, Homo sapiens
atgggccatcctgagtccccttgggaggtttgtaatgcct

SEQ ID NO: 5851 - DNA, 41 bp, Homo sapiens; identical to SEQ ID NO: 3319

SEQ ID NO: 5852 - DNA, 41 bp, Homo sapiens; identical to SEQ ID NO: 3320

SEQ ID NO: 5853 - DNA, 41 bp, Homo sapiens; identical to SEQ ID NO: 3321

SEQ ID NO: 5854 - DNA, 41 bp, Homo sapiens; identical to SEQ ID NO: 3322

SEQ ID NO: 5855 - DNA, 41 bp, Homo sapiens; identical to SEQ ID NO: 3323

SEQ ID NO: 5856 - DNA, 41 bp, Homo sapiens; identical to SEQ ID NO: 3324

SEQ ID NO: 5857 - DNA, 41 bp, Homo sapiens; identical to SEQ ID NO: 3325

SEQ ID NO: 5858 - DNA, 41 bp, Homo sapiens; identical to SEQ ID NO: 3326

SEQ ID NO: 5859 - DNA, 41 bp, Homo sapiens; identical to SEQ ID NO: 3327

SEQ ID NO: 5860 - DNA, 41 bp, Homo sapiens; identical to SEQ ID NO: 3328

SEQ ID NO: 5861 - DNA, 41 bp, Homo sapiens; identical to SEQ ID NO: 3329

SEQ ID NO: 5862 - DNA, 41 bp, Homo sapiens; identical to SEQ ID NO: 3330

SEQ ID NO: 5863 - DNA, 41 bp, Homo sapiens; identical to SEQ ID NO: 3331

SEQ ID NO: 5864 - DNA, 41 bp, Homo sapiens; identical to SEQ ID NO: 3332

SEQ ID NO: 5865 - DNA, 41 bp, Homo sapiens; identical to SEQ ID NO: 3333

SEQ ID NO: 5866 - DNA, 41 bp, Homo sapiens; identical to SEQ ID NO: 3334

SEQ ID NO: 5867 - DNA, 41 bp, Homo sapiens; identical to SEQ ID NO: 3335

SEQ ID NO: 5868 - DNA, 41 bp, Homo sapiens; identical to SEQ ID NO: 3336

SEQ ID NO: 5869 - DNA, 41 bp, Homo sapiens; identical to SEQ ID NO: 3337

SEQ ID NO: 5870 - DNA, 41 bp, Homo sapiens; identical to SEQ ID NO: 3338

SEQ ID NO: 5871 - DNA, 41 bp, Homo sapiens; identical to SEQ ID NO: 3339

SEQ ID NO: 5872 - DNA, 41 bp, Homo sapiens; identical to SEQ ID NO: 3340

SEQ ID NO: 5873 - DNA, 41 bp, Homo sapiens; identical to SEQ ID NO: 3341

SEQ ID NO: 5874 - DNA, 41 bp, Homo sapiens; identical to SEQ ID NO: 3342

SEQ ID NO: 5875 - DNA, 41 bp, Homo sapiens; identical to SEQ ID NO: 3343

SEQ ID NO: 5876 - DNA, 41 bp, Homo sapiens; identical to SEQ ID NO: 3344

SEQ ID NO: 5877 - DNA, 41 bp, Homo sapiens; identical to SEQ ID NO: 3345

SEQ ID NO: 5878 - DNA, 41 bp, Homo sapiens; identical to SEQ ID NO: 3346

SEQ ID NO: 5879 - DNA, 41 bp, Homo sapiens; identical to SEQ ID NO: 3347

SEQ ID NO: 5880 - DNA, 41 bp, Homo sapiens; identical to SEQ ID NO: 3348

SEQ ID NO: 5881 - DNA, 41 bp, Homo sapiens; identical to SEQ ID NO: 3349

SEQ ID NO: 5882 - DNA, 41 bp, Homo sapiens; identical to SEQ ID NO: 3350

SEQ ID NO: 5883 - DNA, 41 bp, Homo sapiens; identical to SEQ ID NO: 3351

SEQ ID NO: 5884 - DNA, 41 bp, Homo sapiens; identical to SEQ ID NO: 1723
  misc_feature (21)..(21): c is present or absent.

SEQ ID NO: 5885 - DNA, 41 bp, Homo sapiens; identical to SEQ ID NO: 1724

SEQ ID NO: 5886 - DNA, 41 bp, Homo sapiens; identical to SEQ ID NO: 1725

SEQ ID NO: 5887 - DNA, 41 bp, Homo sapiens; identical to SEQ ID NO: 1726

SEQ ID NO: 5888 - DNA, 41 bp, Homo sapiens; identical to SEQ ID NO: 1727

SEQ ID NO: 5889 - DNA, 41 bp, Homo sapiens; identical to SEQ ID NO: 1728

SEQ ID NO: 5890 - DNA, 42 bp, Homo sapiens; identical to SEQ ID NO: 1729
  misc_feature (21)..(21): tc is present or absent.

SEQ ID NO: 5891 - DNA, 41 bp, Homo sapiens; identical to SEQ ID NO: 1730

SEQ ID NO: 5892 - DNA, 41 bp, Homo sapiens
ctgcaggcgggtgagggtggmgggaagcgcctggtgagagg

SEQ ID NO: 5893 - DNA, 41 bp, Homo sapiens
agtctggaaagctggaagagytccatgccaggctgaatcaa

SEQ ID NO: 5894 - DNA, 41 bp, Homo sapiens
gaagagctccatgccaggctraatcaatcagcagcccccac

SEQ ID NO: 5895 - DNA, 41 bp, Homo sapiens
gtcccctcttggctcttgccrttccaggagccccagttacc

SEQ ID NO: 5896 - DNA, 41 bp, Homo sapiens
actgtctcctttctttcggayctttgggatgtttacaatac

SEQ ID NO: 5897 - DNA, 41 bp, Homo sapiens
cccgatttgccactatacttycgtgtattggtagcaggaat

SEQ ID NO: 5898 - DNA, 41 bp, Homo sapiens
caggggctagcaaggcagccrgggcccaggcgtctgagtga

SEQ ID NO: 5899 - DNA, 41 bp, Homo sapiens
cacacatgactgcacctcatsctgtgggtccactctgagta

SEQ ID NO: 5900 - DNA, 41 bp, Homo sapiens
cgcgtgggggtctctgcgccrtccaactctggcttgtttcc

SEQ ID NO: 5901 - DNA, 41 bp, Homo sapiens
cggacgtggacccccagtccscggtgatgcaagaggagatc

SEQ ID NO: 5902 - DNA, 41 bp, Homo sapiens
  misc_feature (21)..(21): c is present or absent.
gctgcctccctctgggcccccagggctgggcacactcaccc

SEQ ID NO: 5903 - DNA, 40 bp, Homo sapiens
gctgcctccctctgggccccagggctgggcacactcaccc

SEQ ID NO: 5904 - DNA, 41 bp, Homo sapiens
  misc_feature (21)..(21): g is present or absent.
cacagtgtggatgccctggggacaccctagacattggccac

SEQ ID NO: 5905 - DNA, 41 bp, Homo sapiens; identical to SEQ ID NO: 1803

SEQ ID NO: 5906 - DNA, 41 bp, Homo sapiens; identical to SEQ ID NO: 1804

SEQ ID NO: 5907 - DNA, 41 bp, Homo sapiens; identical to SEQ ID NO: 1805

SEQ ID NO: 5908 - DNA, 41 bp, Homo sapiens; identical to SEQ ID NO: 1806

SEQ ID NO: 5909 - DNA, 41 bp, Homo sapiens; identical to SEQ ID NO: 1807

SEQ ID NO: 5910 - DNA, 41 bp, Homo sapiens; identical to SEQ ID NO: 1808

SEQ ID NO: 5911 - DNA, 41 bp, Homo sapiens; identical to SEQ ID NO: 1809

SEQ ID NO: 5912 - DNA, 41 bp, Homo sapiens; identical to SEQ ID NO: 1810

SEQ ID NO: 5913 - DNA, 41 bp, Homo sapiens; identical to SEQ ID NO: 1811

SEQ ID NO: 5914 - DNA, 41 bp, Homo sapiens; identical to SEQ ID NO: 1812

SEQ ID NO: 5915 - DNA, 41 bp, Homo sapiens; identical to SEQ ID NO: 1813

SEQ ID NO: 5916 - DNA, 41 bp, Homo sapiens; identical to SEQ ID NO: 1814

SEQ ID NO: 5917 - DNA, 41 bp, Homo sapiens; identical to SEQ ID NO: 1815
  misc_feature (21)..(21): a is present or absent.

SEQ ID NO: 5918 - DNA, 41 bp, Homo sapiens; identical to SEQ ID NO: 1816

SEQ ID NO: 5919 - DNA, 41 bp, Homo sapiens; identical to SEQ ID NO: 1817

SEQ ID NO: 5920 - DNA, 41 bp, Homo sapiens; identical to SEQ ID NO: 1818

SEQ ID NO: 5921 - DNA, 42 bp, Homo sapiens; identical to SEQ ID NO: 1819
  misc_feature (21)..(22): ca is present or absent.

SEQ ID NO: 5922 - DNA, 41 bp, Homo sapiens; identical to SEQ ID NO: 1820
  misc_feature (21)..(21): t is present or absent.

SEQ ID NO: 5923 - DNA, 41 bp, Homo sapiens; identical to SEQ ID NO: 1821

SEQ ID NO: 5924 - DNA, 41 bp, Homo sapiens; identical to SEQ ID NO: 1822

SEQ ID NO: 5925 - DNA, 41 bp, Homo sapiens; identical to SEQ ID NO: 1822

SEQ ID NO: 5926 - DNA, 41 bp, Homo sapiens; identical to SEQ ID NO: 1732

SEQ ID NO: 5927 - DNA, 41 bp, Homo sapiens; identical to SEQ ID NO: 1733

SEQ ID NO: 5928 - DNA, 41 bp, Homo sapiens; identical to SEQ ID NO: 1734

SEQ ID NO: 5929 - DNA, 41 bp, Homo sapiens; identical to SEQ ID NO: 1735

SEQ ID NO: 5930 - DNA, 41 bp, Homo sapiens; identical to SEQ ID NO: 1736

SEQ ID NO: 5931 - DNA, 41 bp, Homo sapiens; identical to SEQ ID NO: 1737

SEQ ID NO: 5932 - DNA, 41 bp, Homo sapiens; identical to SEQ ID NO: 1738

SEQ ID NO: 5933 - DNA, 41 bp, Homo sapiens; identical to SEQ ID NO: 1739

SEQ ID NO: 5934 - DNA, 42 bp, Homo sapiens; identical to SEQ ID NO: 1740
  misc_feature (21)..(22): ct is present or absent.

SEQ ID NO: 5935 - DNA, 41 bp, Homo sapiens; identical to SEQ ID NO: 1741

SEQ ID NO: 5936 - DNA, 41 bp, Homo sapiens; identical to SEQ ID NO: 1742

SEQ ID NO: 5937 - DNA, 41 bp, Homo sapiens; identical to SEQ ID NO: 1743

SEQ ID NO: 5938 - DNA, 41 bp, Homo sapiens; identical to SEQ ID NO: 1744

SEQ ID NO: 5939 - DNA, 41 bp, Homo sapiens; identical to SEQ ID NO: 1745

SEQ ID NO: 5940 - DNA, 41 bp, Homo sapiens; identical to SEQ ID NO: 1746

SEQ ID NO: 5941 - DNA, 41 bp, Homo sapiens; identical to SEQ ID NO: 1747

SEQ ID NO: 5942 - DNA, 41 bp, Homo sapiens; identical to SEQ ID NO: 1748

SEQ ID NO: 5943 - DNA, 41 bp, Homo sapiens; identical to SEQ ID NO: 1749

SEQ ID NO: 5944 - DNA, 41 bp, Homo sapiens; identical to SEQ ID NO: 1750

SEQ ID NO: 5945 - DNA, 41 bp, Homo sapiens; identical to SEQ ID NO: 1751

SEQ ID NO: 5946 - DNA, 41 bp, Homo sapiens; identical to SEQ ID NO: 1752

SEQ ID NO: 5947 - DNA, 41 bp, Homo sapiens; identical to SEQ ID NO: 1753

SEQ ID NO: 5948 - DNA, 41 bp, Homo sapiens; identical to SEQ ID NO: 1754

SEQ ID NO: 5949 - DNA, 41 bp, Homo sapiens; identical to SEQ ID NO: 1755

SEQ ID NO: 5950 - DNA, 41 bp, Homo sapiens; identical to SEQ ID NO: 1756

SEQ ID NO: 5951 - DNA, 41 bp, Homo sapiens; identical to SEQ ID NO: 1757

SEQ ID NO: 5952 - DNA, 41 bp, Homo sapiens; identical to SEQ ID NO: 1758

SEQ ID NO: 5953 - DNA, 41 bp, Homo sapiens; identical to SEQ ID NO: 1759

SEQ ID NO: 5954 - DNA, 41 bp, Homo sapiens; identical to SEQ ID NO: 1760

SEQ ID NO: 5955 - DNA, 41 bp, Homo sapiens; identical to SEQ ID NO: 1761

SEQ ID NO: 5956 - DNA, 41 bp, Homo sapiens; identical to SEQ ID NO: 1762

SEQ ID NO: 5957 - DNA, 41 bp, Homo sapiens; identical to SEQ ID NO: 1763

SEQ ID NO: 5958 - DNA, 41 bp, Homo sapiens; identical to SEQ ID NO: 1764

SEQ ID NO: 5959 - DNA, 41 bp, Homo sapiens; identical to SEQ ID NO: 1765

SEQ ID NO: 5960 - DNA, 41 bp, Homo sapiens; identical to SEQ ID NO: 1766

SEQ ID NO: 5961 - DNA, 41 bp, Homo sapiens; identical to SEQ ID NO: 1767

SEQ ID NO: 5962 - DNA, 41 bp, Homo sapiens; identical to SEQ ID NO: 1768

SEQ ID NO: 5963 - DNA, 41 bp, Homo sapiens; identical to SEQ ID NO: 1769

SEQ ID NO: 5964 - DNA, 41 bp, Homo sapiens; identical to SEQ ID NO: 1770

SEQ ID NO: 5965 - DNA, 41 bp, Homo sapiens; identical to SEQ ID NO: 1771
  misc_feature (21)..(21): a is present or absent.

SEQ ID NO: 5966 - DNA, 40 bp, Homo sapiens; identical to SEQ ID NO: 1772

SEQ ID NO: 5967 - DNA, 41 bp, Homo sapiens; identical to SEQ ID NO: 1773

SEQ ID NO: 5968 - DNA, 41 bp, Homo sapiens; identical to SEQ ID NO: 1774

SEQ ID NO: 5969 - DNA, 41 bp, Homo sapiens; identical to SEQ ID NO: 1775

SEQ ID NO: 5970 - DNA, 41 bp, Homo sapiens; identical to SEQ ID NO: 1776

SEQ ID NO: 5971 - DNA, 41 bp, Homo sapiens; identical to SEQ ID NO: 1777

SEQ ID NO: 5972 - DNA, 41 bp, Homo sapiens
gaaattgattaaactctactrttatcacttctgccatatgt

SEQ ID NO: 5973 - DNA, 41 bp, Homo sapiens
gtgaaaaggtgacagcagtcygcaggtgcatctactggcga

SEQ ID NO: 5974 - DNA, 41 bp, Homo sapiens
ggtcgcgccaggagagaagcygcgcggcgcttagggcaagg

SEQ ID NO: 5975 - DNA, 41 bp, Homo sapiens
agggcggcgcggcggtgcagsgagaaagacgcggagagagg

SEQ ID NO: 5976 - DNA, 41 bp, Homo sapiens
gggcggcgcggcggtgcagcragaaagacgcggagagaggg

SEQ ID NO: 5977 - DNA, 41 bp, Homo sapiens
gcggcctggtccctgcctccsggcctgcgcccggcccggcc

SEQ ID NO: 5978 - DNA, 41 bp, Homo sapiens
cctaaccgtggaggggcgggragaaaggggaggggtgtcag

SEQ ID NO: 5979 - DNA, 41 bp, Homo sapiens
gtctgtacaaaaaaaattttkttttaattagctgagcatga

SEQ ID NO: 5980 - DNA, 41 bp, Homo sapiens
  misc_feature (21)..(21): t is present or absent.
gtacaaaaaaaatttttttttaattagctgagcatgatcat

SEQ ID NO: 5981 - DNA, 41 bp, Homo sapiens
  misc_feature (21)..(21): t is present or absent.
gttttggttgtttttttttttaaacttgtttttgtacattt

SEQ ID NO: 5982 - DNA, 41 bp, Homo sapiens
cggagacattatccacacccyggcaaaggacaggcgggccc

SEQ ID NO: 5983 - DNA, 41 bp, Homo sapiens
gtggtggcagtgagtggaatkatgcatttctaatgcctgca

SEQ ID NO: 5984 - DNA, 41 bp, Homo sapiens
atcacccggaaggtgggggcygccctggcagccggctgtac

SEQ ID NO: 5985 - DNA, 41 bp, Homo sapiens
atcgtgcttataaatcagttytgctaggtataaaatccttg

SEQ ID NO: 5986 - DNA, 53 bp, Homo sapiens
  misc_feature (32)..(33): t is present or absent.
tataaaatccttggctcacatttttttttttttacttgattatcttaaatgta

SEQ ID NO: 5987 - DNA, 41 bp, Homo sapiens
  misc_feature (21)..(21): t is present or absent.
tataagtcaacttttttttttacctagatacacaaaagtgt

SEQ ID NO: 5988 - DNA, 41 bp, Homo sapiens
tttggtttttttccccctttrtctttaaagaccaataatgt

SEQ ID NO: 5989 - DNA, 58 bp, Homo sapiens
  misc_feature (37)..(38): t is present or absent.
atctatttatttctcttttcttttttttttttttttttcagtttggtaaattgttggc

SEQ ID NO: 5990 - DNA, 41 bp, Homo sapiens
ttcagtttggtaaattgttgscacatgtttgctgtttctct

SEQ ID NO: 5991 - DNA, 44 bp, Homo sapiens
  misc_feature (21)..(24): ctta present or absent.
tttgaatagataaacacttacttatatggttgaaaaattaagac

SEQ ID NO: 5992 - DNA, 41 bp, Homo sapiens
  misc_feature (21)..(21): c is present or absent.
accatgacaagtctcaccctcaccccaaccctgactcactc

SEQ ID NO: 5993 - DNA, 40 bp, Homo sapiens
accatgacaagtctcaccctaccccaaccctgactcactc

SEQ ID NO: 5994 - DNA, 52 bp, Homo sapiens
  misc_feature (31)..(32): a is present or absent.
aaaaaatgatgttaaaaggcaaaaaaaaaaaatgaaaacaaaaaagtcattt

SEQ ID NO: 5995 - DNA, 42 bp, Homo sapiens
  misc_feature (21)..(22): gt is present or absent.
cagtccttgtgtgtgtgtgtgtcccccaaacacactgctgga

SEQ ID NO: 5996 - DNA, 41 bp, Homo sapiens
  misc_feature (21)..(21): a is present or absent.
tttttgaaaaagaaaaaaaaatggaactagttatagttttc

SEQ ID NO: 5997 - DNA, 41 bp, Homo sapiens
gatcacctggaactcacaggygtggtaggagacgtgcagcc

SEQ ID NO: 5998 - DNA, 41 bp, Homo sapiens
cagtgagtgccttggggaagragccagcatgtgaaatgatg

SEQ ID NO: 5999 - DNA, 41 bp, Homo sapiens
gtccatggtgtgcgcttataraatgtttgctaagctgaact

SEQ ID NO: 6000 - DNA, 41 bp, Homo sapiens
ctctaaagcagaaccaagagsaaaagcatgggagtatacca

SEQ ID NO: 6001 - DNA, 44 bp, Homo sapiens
  misc_feature (21)..(24): aatt is present or absent.
ggagtataccaaaacaacttaattgttacttgaaatgacttgca

SEQ ID NO: 6002 - DNA, 41 bp, Homo sapiens
tgccattgctcccttcccccwccctacttcactatccgtgg

SEQ ID NO: 6003 - DNA, 41 bp, Homo sapiens
  misc_feature (21)..(21): t is present or absent.
gttcccaccccaaaatcagctcttctagtgctacacaccct

SEQ ID NO: 6004 - DNA, 41 bp, Homo sapiens
atatttcttgctgcgatcctygttctgttctagtatctttt

SEQ ID NO: 6005 - DNA, 41 bp, Homo sapiens
gagtcattgagaaccttaagraagtattttgtccttttcca

SEQ ID NO: 6006 - DNA, 41 bp, Homo sapiens
agtcttgccatctctttctaygttaggcactgacataggct

SEQ ID NO: 6007 - DNA, 41 bp, Homo sapiens
caggagaggaaggagttcctkataaaggatatagcaagtag

SEQ ID NO: 6008 - DNA, 41 bp, Homo sapiens
gcaacaatgctaatgggtgtytcttaggaaatgaagaaaag

SEQ ID NO: 6009 - DNA, 41 bp, Homo sapiens
  misc_feature (21)..(21): g is present or absent.
gtttgtttgtttgtttgtttgtttttttcagccaactgtaa

SEQ ID NO: 6010 - DNA, 41 bp, Homo sapiens
gactctctcccttgtactgcrtctcctccagtcttattctt

SEQ ID NO: 6011 - DNA, 41 bp, Homo sapiens
aaagaggaacattcttgcatyaatttctatttgtgtgtctt

SEQ ID NO: 6012 - DNA, 41 bp, Homo sapiens
ggcaagtcagtgtaccctgcrccccttcattggcctgaacc

SEQ ID NO: 6013 - DNA, 41 bp, Homo sapiens
tcccgggttcaagcgattctmctgcctcagcctcccgagta

SEQ ID NO: 6014 - DNA, 41 bp, Homo sapiens
gcctcctgagcagcttggacyacaggtgcgggccaccacct

SEQ ID NO: 6015 - DNA, 41 bp, Homo sapiens
gatatcaaaatataaacatayagacatatttgggaggcaaa

SEQ ID NO: 6016 - DNA, 41 bp, Homo sapiens
aatataaacatacagacatakttgggaggcaaaggagtgaa

SEQ ID NO: 6017 - DNA, 41 bp, Homo sapiens
ttttgtcttttcctttaagamattttcttaaagatattcag

SEQ ID NO: 6018 - DNA, 41 bp, Homo sapiens
cctgcaaagttttctttagcycctcttttatcccacaatac

SEQ ID NO: 6019 - DNA, 41 bp, Homo sapiens
cgtgttggtcaggctggtctygaactcctgacctcaggtga

SEQ ID NO: 6020 - DNA, 41 bp, Homo sapiens
caggctggtctcgaactcctsacctcaggtgatccgcctgc

SEQ ID NO: 6021 - DNA, 42 bp, Homo sapiens
  misc_feature (21)..(22): at is present or absent.
gctgaacattgttaatatatattcattagccaattgtgttcc

SEQ ID NO: 6022 - DNA, 40 bp, Homo sapiens
gctgaacattgttaatatattcattagccaattgtgttcc

SEQ ID NO: 6023 - DNA, 41 bp, Homo sapiens
gggatctgaagcccttgctayatgtgtcacacatgtttttg

SEQ ID NO: 6024 - DNA, 41 bp, Homo sapiens
gcacatctaggaagatgtgarcagccactgtggccccggtt

SEQ ID NO: 6025 - DNA, 41 bp, Homo sapiens
atgctctctgagagcgtcagktgccctcccacattcactga

SEQ ID NO: 6026 - DNA, 41 bp, Homo sapiens
gcattggttgaaatggagcgygtttctttgtttctatggta

SEQ ID NO: 6027 - DNA, 65 bp, Homo sapiens
  misc_feature (21)..(25): caaaa is present or absent.
gtgagaatccatctaaaaaacaaaacaaaacaaaacaaaacaaaaatgaggtgtgtggagacctg

SEQ ID NO: 6028 - DNA, 41 bp, Homo sapiens
cactacacggtgcgggcccckgtgggagtcggtgagtgctg

SEQ ID NO: 6029 - DNA, 41 bp, Homo sapiens
aggtctttttgctatgtcacyccacggccagggcaggagtg

SEQ ID NO: 6030 - DNA, 41 bp, Homo sapiens
ctttttgctatgtcaccccayggccagggcaggagtgctgg

SEQ ID NO: 6031 - DNA, 41 bp, Homo sapiens
tctctcctgagaccaagaacrtctggatagatgatgagtta

SEQ ID NO: 6032 - DNA, 41 bp, Homo sapiens
agtcctgggcatttaaacagmcttgacagataaacttcctt

SEQ ID NO: 6033 - DNA, 41 bp, Homo sapiens
ttttccagatgcaagagactsccttgttctctctccttctg

SEQ ID NO: 6034 - DNA, 41 bp, Homo sapiens
ttcttcttcttcttcttcttytttcttttttaacatgtact

SEQ ID NO: 6035 - DNA, 41 bp, Homo sapiens
tgagtgtgaattctaactttwctgtttattagctctatgaa

SEQ ID NO: 6036 - DNA, 50 bp, Homo sapiens
  misc_feature (30)..(30): a is present or absent.
tacagtgagaccttgtctttaaaaaaaaaatgctgcaaaaccaaaaataa

SEQ ID NO: 6037 - DNA, 41 bp, Homo sapiens
ctcagctgagtccccttgacyttaatcactttagtgaagaa

SEQ ID NO: 6038 - DNA, 41 bp, Homo sapiens; identical to SEQ ID NO: 1778

SEQ ID NO: 6039 - DNA, 41 bp, Homo sapiens; identical to SEQ ID NO: 1779

SEQ ID NO: 6040 - DNA, 41 bp, Homo sapiens; identical to SEQ ID NO: 1780

SEQ ID NO: 6041 - DNA, 41 bp, Homo sapiens; identical to SEQ ID NO: 1781
  misc_feature (21)..(21): a is present or absent.

SEQ ID NO: 6042 - DNA, 41 bp, Homo sapiens; identical to SEQ ID NO: 1782

SEQ ID NO: 6043 - DNA, 41 bp, Homo sapiens; identical to SEQ ID NO: 1783

SEQ ID NO: 6044 - DNA, 41 bp, Homo sapiens; identical to SEQ ID NO: 1784

SEQ ID NO: 6045 - DNA, 41 bp, Homo sapiens; identical to SEQ ID NO: 1785

SEQ ID NO: 6046 - DNA, 41 bp, Homo sapiens; identical to SEQ ID NO: 1786

SEQ ID NO: 6047 - DNA, 41 bp, Homo sapiens; identical to SEQ ID NO: 1787
  misc_feature (21)..(21): t is present or absent.

SEQ ID NO: 6048 - DNA, 41 bp, Homo sapiens; identical to SEQ ID NO: 1788

SEQ ID NO: 6049 - DNA, 41 bp, Homo sapiens; identical to SEQ ID NO: 1789

SEQ ID NO: 6050 - DNA, 41 bp, Homo sapiens; identical to SEQ ID NO: 1790

SEQ ID NO: 6051 - DNA, 41 bp, Homo sapiens; identical to SEQ ID NO: 1791
  misc_feature (21)..(21): t is present or absent.

SEQ ID NO: 6052 - DNA, 41 bp, Homo sapiens; identical to SEQ ID NO: 1792
  misc_feature (21)..(21): g is present or absent.

SEQ ID NO: 6053 - DNA, 41 bp, Homo sapiens; identical to SEQ ID NO: 1793

SEQ ID NO: 6054 - DNA, 41 bp, Homo sapiens; identical to SEQ ID NO: 1794

SEQ ID NO: 6055 - DNA, 41 bp, Homo sapiens; identical to SEQ ID NO: 1795

SEQ ID NO: 6056 - DNA, 41 bp, Homo sapiens; identical to SEQ ID NO: 1796

SEQ ID NO: 6057 - DNA, 41 bp, Homo sapiens; identical to SEQ ID NO: 1797

SEQ ID NO: 6058 - DNA, 41 bp, Homo sapiens; identical to SEQ ID NO: 1798

SEQ ID NO: 6059 - DNA, 41 bp, Homo sapiens; identical to SEQ ID NO: 1799

SEQ ID NO: 6060 - DNA, 41 bp, Homo sapiens; identical to SEQ ID NO: 1800
  misc_feature (21)..(21): t is present or absent.

SEQ ID NO: 6061 - DNA, 41 bp, Homo sapiens; identical to SEQ ID NO: 1801
  misc_feature (21)..(21): t is present or absent.

SEQ ID NO: 6062 - DNA, 41 bp, Homo sapiens; identical to SEQ ID NO: 1802
  misc_feature (21)..(21): a is present or absent.

SEQ ID NO: 6063 - DNA, 41 bp, Homo sapiens; identical to SEQ ID NO: 512

SEQ ID NO: 6064 - DNA, 41 bp, Homo sapiens; identical to SEQ ID NO: 513

SEQ ID NO: 6065 - DNA, 41 bp, Homo sapiens
aatggasgctacatggctatrgctgaatgagcatgaccttt

SEQ ID NO: 6066 - DNA, 41 bp, Homo sapiens; identical to SEQ ID NO: 515

SEQ ID NO: 6067 - DNA, 41 bp, Homo sapiens; identical to SEQ ID NO: 516

SEQ ID NO: 6068 - DNA, 41 bp, Homo sapiens; identical to SEQ ID NO: 517

SEQ ID NO: 6069 - DNA, 41 bp, Homo sapiens; identical to SEQ ID NO: 518

SEQ ID NO: 6070 - DNA, 41 bp, Homo sapiens; identical to SEQ ID NO: 519

SEQ ID NO: 6071 - DNA, 41 bp, Homo sapiens; identical to SEQ ID NO: 520

SEQ ID NO: 6072 - DNA, 43 bp, Homo sapiens; identical to SEQ ID NO: 676
  misc_feature (21)..(23): gaa is present or absent.

SEQ ID NO: 6073 - DNA, 42 bp, Homo sapiens; identical to SEQ ID NO: 677
  misc_feature (21)..(22): ag is present or absent.

SEQ ID NO: 6074 - DNA, 41 bp, Homo sapiens; identical to SEQ ID NO: 521

SEQ ID NO: 6075 - DNA, 41 bp, Homo sapiens; identical to SEQ ID NO: 522

SEQ ID NO: 6076 - DNA, 41 bp, Homo sapiens; identical to SEQ ID NO: 523

SEQ ID NO: 6077 - DNA, 41 bp, Homo sapiens; identical to SEQ ID NO: 524

SEQ ID NO: 6078 - DNA, 41 bp, Homo sapiens; identical to SEQ ID NO: 525

SEQ ID NO: 6079 - DNA, 41 bp, Homo sapiens; identical to SEQ ID NO: 526

SEQ ID NO: 6080 - DNA, 41 bp, Homo sapiens
acagccagagacccagaaccrtcagggctggttgatggact

SEQ ID NO: 6081 - DNA, 41 bp, Homo sapiens
catcaggtgggacaaaaagartagctccttagcagtgacta

SEQ ID NO: 6082 - DNA, 41 bp, Homo sapiens
actcaagcatatgtgcaaccragtacatgaaaagaatttgt

SEQ ID NO: 6083 - DNA, 41 bp, Homo sapiens
ggtaagttaaatgggcgattstgaggagtagaaatttcctt

SEQ ID NO: 6084 - DNA, 41 bp, Homo sapiens
ttcaataaaagaaaaaagaawttaaaaaatcttggagctca

SEQ ID NO: 6085 - DNA, 41 bp, Homo sapiens
ttatatttgaaattaaaaatrtaatttgaggctagaaaaaa

SEQ ID NO: 6086 - DNA, 41 bp, Homo sapiens
tcaaagagggatctcacaatyggacatctcaacctgcttat

SEQ ID NO: 6087 - DNA, 41 bp, Homo sapiens
tttacgcacacaattactcaytaataaaaaatttaaaaaat

SEQ ID NO: 6088 - DNA, 41 bp, Homo sapiens
actgagactctggagcaatayattaagaatcatactgaaca

SEQ ID NO: 6089 - DNA, 51 bp, Homo sapiens
  misc_feature (30)..(31): t is present or absent.
ggtaaactttaatacacctgtttttttttttcaagaaataaaaaatgtaat

SEQ ID NO: 6090 - DNA, 41 bp, Homo sapiens
  misc_feature (21)..(21): a is present or absent.
tccagtcaaagtcgacctaaatttccaggagttgttcttcc

SEQ ID NO: 6091 - DNA, 41 bp, Homo sapiens
  misc_feature (21)..(21): t is present or absent.
ttggtggtcagttttttttttcttcatagctttaaattctt

SEQ ID NO: 6092 - DNA, 41 bp, Homo sapiens
taactgctgtaaagttacacrrggaagccctttcccgacaa

SEQ ID NO: 6093 - DNA, 41 bp, Homo sapiens
aactgctgtaaagttacacrrggaagccctttcccgacaaa

SEQ ID NO: 6094 - DNA, 41 bp, Homo sapiens; identical to SEQ ID NO: 527

SEQ ID NO: 6095 - DNA, 41 bp, Homo sapiens; identical to SEQ ID NO: 528

SEQ ID NO: 6096 - DNA, 41 bp, Homo sapiens; identical to SEQ ID NO: 529

SEQ ID NO: 6097 - DNA, 41 bp, Homo sapiens; identical to SEQ ID NO: 530

SEQ ID NO: 6098 - DNA, 41 bp, Homo sapiens; identical to SEQ ID NO: 531

SEQ ID NO: 6099 - DNA, 41 bp, Homo sapiens; identical to SEQ ID NO: 532

SEQ ID NO: 6100 - DNA, 41 bp, Homo sapiens; identical to SEQ ID NO: 533

SEQ ID NO: 6101 - DNA, 41 bp, Homo sapiens; identical to SEQ ID NO: 534

SEQ ID NO: 6102 - DNA, 41 bp, Homo sapiens; identical to SEQ ID NO: 535

SEQ ID NO: 6103 - DNA, 41 bp, Homo sapiens; identical to SEQ ID NO: 536

SEQ ID NO: 6104 - DNA, 41 bp, Homo sapiens; identical to SEQ ID NO: 537

SEQ ID NO: 6105 - DNA, 41 bp, Homo sapiens; identical to SEQ ID NO: 538

SEQ ID NO: 6106 - DNA, 41 bp, Homo sapiens; identical to SEQ ID NO: 680

SEQ ID NO: 6107 - DNA, 41 bp, Homo sapiens; identical to SEQ ID NO: 540

SEQ ID NO: 6108 - DNA, 41 bp, Homo sapiens; identical to SEQ ID NO: 541

SEQ ID NO: 6109 - DNA, 41 bp, Homo sapiens; identical to SEQ ID NO: 542

SEQ ID NO: 6110 - DNA, 41 bp, Homo sapiens; identical to SEQ ID NO: 543

SEQ ID NO: 6111 - DNA, 41 bp, Homo sapiens; identical to SEQ ID NO: 544

SEQ ID NO: 6112 - DNA, 41 bp, Homo sapiens; identical to SEQ ID NO: 545

SEQ ID NO: 6113 - DNA, 41 bp, Homo sapiens; identical to SEQ ID NO: 546

SEQ ID NO: 6114 - DNA, 41 bp, Homo sapiens; identical to SEQ ID NO: 547

SEQ ID NO: 6115 - DNA, 41 bp, Homo sapiens; identical to SEQ ID NO: 548

SEQ ID NO: 6116 - DNA, 41 bp, Homo sapiens; identical to SEQ ID NO: 549

SEQ ID NO: 6117 - DNA, 41 bp, Homo sapiens; identical to SEQ ID NO: 550

SEQ ID NO: 6118 - DNA, 41 bp, Homo sapiens; identical to SEQ ID NO: 551

SEQ ID NO: 6119 - DNA, 41 bp, Homo sapiens; identical to SEQ ID NO: 552

SEQ ID NO: 6120 - DNA, 41 bp, Homo sapiens
tctttcccttttgacttcaamtcagtcatcagaatttcccc

SEQ ID NO: 6121 - DNA, 41 bp, Homo sapiens
cctcgttgtacatcagagacrgagcattttacaccttgaag

SEQ ID NO: 6122 - DNA, 41 bp, Homo sapiens
gcatttgggaagggaaaatckaattaaaagcctaaactaaa

SEQ ID NO: 6123 - DNA, 41 bp, Homo sapiens
agactcggccttttccagatkagcttcagtgtaagagtggg

SEQ ID NO: 6124 - DNA, 41 bp, Homo sapiens
ttaagtaagccatttaccaaygctcagaagaaagaacttga

SEQ ID NO: 6125 - DNA, 41 bp, Homo sapiens
tcttgctacaaaccaaaaaaygcagcatggtggtggggagg

SEQ ID NO: 6126 - DNA, 41 bp, Homo sapiens
cagacagtaagaagattctayaccatggcctcatatctatt

SEQ ID NO: 6127 - DNA, 41 bp, Homo sapiens
agatttaaaactccaatttayataaaaagttgccataatag

SEQ ID NO: 6128 - DNA, 41 bp, Homo sapiens
tatagaggttcacacacacaygccttcattgcgtgtgcatg

SEQ ID NO: 6129 - DNA, 41 bp, Homo sapiens; identical to SEQ ID NO: 2699

SEQ ID NO: 6130 - DNA, 41 bp, Homo sapiens; identical to SEQ ID NO: 2700

SEQ ID NO: 6131 - DNA, 41 bp, Homo sapiens
atttcagaagatttattaacwtgaaaaggatcactctgytt

SEQ ID NO: 6132 - DNA, 41 bp, Homo sapiens; identical to SEQ ID NO: 2702

SEQ ID NO: 6133 - DNA, 41 bp, Homo sapiens; identical to SEQ ID NO: 2703

SEQ ID NO: 6134 - DNA, 41 bp, Homo sapiens; identical to SEQ ID NO: 2706

SEQ ID NO: 6135 - DNA, 41 bp, Homo sapiens; identical to SEQ ID NO: 2707

SEQ ID NO: 6136 - DNA, 41 bp, Homo sapiens; identical to SEQ ID NO: 2709

SEQ ID NO: 6137 - DNA, 41 bp, Homo sapiens; identical to SEQ ID NO: 2710

SEQ ID NO: 6138 - DNA, 41 bp, Homo sapiens; identical to SEQ ID NO: 2711

SEQ ID NO: 6139 - DNA, 41 bp, Homo sapiens; identical to SEQ ID NO: 2712

SEQ ID NO: 6140 - DNA, 41 bp, Homo sapiens; identical to SEQ ID NO: 2713

SEQ ID NO: 6141 - DNA, 41 bp, Homo sapiens; identical to SEQ ID NO: 2714

SEQ ID NO: 6142 - DNA, 41 bp, Homo sapiens; identical to SEQ ID NO: 2715

SEQ ID NO: 6143 - DNA, 41 bp, Homo sapiens; identical to SEQ ID NO: 2716

SEQ ID NO: 6144 - DNA, 41 bp, Homo sapiens
tagacaaagaccctttcaatmaacaaagttagaaatgtgtt

SEQ ID NO: 6145 - DNA, 41 bp, Homo sapiens; identical to SEQ ID NO: 2717

SEQ ID NO: 6146 - DNA, 41 bp, Homo sapiens; identical to SEQ ID NO: 2718

SEQ ID NO: 6147 - DNA, 41 bp, Homo sapiens; identical to SEQ ID NO: 2719

SEQ ID NO: 6148 - DNA, 41 bp, Homo sapiens; identical to SEQ ID NO: 2720

SEQ ID NO: 6149 - DNA, 41 bp, Homo sapiens; identical to SEQ ID NO: 2721

SEQ ID NO: 6150 - DNA, 41 bp, Homo sapiens; identical to SEQ ID NO: 2722

SEQ ID NO: 6151 - DNA, 41 bp, Homo sapiens; identical to SEQ ID NO: 2723

SEQ ID NO: 6152 - DNA, 41 bp, Homo sapiens; identical to SEQ ID NO: 2724

SEQ ID NO: 6153 - DNA, 41 bp, Homo sapiens; identical to SEQ ID NO: 2725

SEQ ID NO: 6154 - DNA, 41 bp, Homo sapiens; identical to SEQ ID NO: 2726

SEQ ID NO: 6155 - DNA, 41 bp, Homo sapiens; identical to SEQ ID NO: 2727

SEQ ID NO: 6156 - DNA, 41 bp, Homo sapiens; identical to SEQ ID NO: 2728

SEQ ID NO: 6157 - DNA, 41 bp, Homo sapiens; identical to SEQ ID NO: 2729

SEQ ID NO: 6158 - DNA, 41 bp, Homo sapiens; identical to SEQ ID NO: 2737

SEQ ID NO: 6159 - DNA, 41 bp, Homo sapiens; identical to SEQ ID NO: 2738

SEQ ID NO: 6160 - DNA, 41 bp, Homo sapiens; identical to SEQ ID NO: 2739

SEQ ID NO: 6161 - DNA, 41 bp, Homo sapiens; identical to SEQ ID NO: 2740

SEQ ID NO: 6162 - DNA, 41 bp, Homo sapiens
tttttaaaattcagaaactcrrttatggtgtattcttacaa

SEQ ID NO: 6163 - DNA, 41 bp, Homo sapiens
ttttaaaattcagaaactcrrttatggtgtattcttacaaa

SEQ ID NO: 6164 - DNA, 41 bp, Homo sapiens; identical to SEQ ID NO: 2745

SEQ ID NO: 6165 - DNA, 41 bp, Homo sapiens; identical to SEQ ID NO: 2746

SEQ ID NO: 6166 - DNA, 41 bp, Homo sapiens; identical to SEQ ID NO: 2747

SEQ ID NO: 6167 - DNA, 41 bp, Homo sapiens; identical to SEQ ID NO: 2748

SEQ ID NO: 6168 - DNA, 41 bp, Homo sapiens; identical to SEQ ID NO: 2750

SEQ ID NO: 6169 - DNA, 41 bp, Homo sapiens; identical to SEQ ID NO: 2751

SEQ ID NO: 6170 - DNA, 41 bp, Homo sapiens; identical to SEQ ID NO: 2752

SEQ ID NO: 6171 - DNA, 41 bp, Homo sapiens; identical to SEQ ID NO: 2753

SEQ ID NO: 6172 - DNA, 41 bp, Homo sapiens; identical to SEQ ID NO: 2754

SEQ ID NO: 6173 - DNA, 43 bp, Homo sapiens; identical to SEQ ID NO: 2755
  misc_feature (21)..(23): tat is present or absent.

SEQ ID NO: 6174 - DNA, 74 bp, Homo sapiens; identical to SEQ ID NO: 2756
  misc_feature (49)..(50): ac is present or absent.
  misc_feature (51)..(52): ac is present or absent.
  misc_feature (53)..(54): ac is present or absent.

SEQ ID NO: 6175 - DNA, 67 bp, Homo sapiens; identical to SEQ ID NO: 2757
  misc_feature (37)..(47): a is present or absent.

SEQ ID NO: 6176 - DNA, 41 bp, Homo sapiens; identical to SEQ ID NO: 2758
  misc_feature (21)..(21): t is present or absent.

SEQ ID NO: 6177 - DNA, 50 bp, Homo sapiens
  misc_feature (29)..(30): a is present or absent.
ctgttaggaaacaattggttaaaaaaaaaacttttttgagttgacwatgg

SEQ ID NO: 6178 - DNA, 62 bp, Homo sapiens; identical to SEQ ID NO: 2760
  misc_feature (39)..(40): gt is present or absent.
  misc_feature (41)..(42): gt is present or absent.

SEQ ID NO: 6179 - DNA, 42 bp, Homo sapiens; identical to SEQ ID NO: 2761
  misc_feature (21)..(22): aa is present or absent.

SEQ ID NO: 6180 - DNA, 41 bp, Homo sapiens; identical to SEQ ID NO: 2762
  misc_feature (21)..(21): t is present or absent.

SEQ ID NO: 6181 - DNA, 64 bp, Homo sapiens; identical to SEQ ID NO: 2763
  misc_feature (37)..(38): ac is present or absent.
  misc_feature (39)..(40): ac is present or absent.
  misc_feature (41)..(42): ac is present or absent.
  misc_feature (43)..(44): ac is present or absent.

SEQ ID NO: 6182 - DNA, 41 bp, Homo sapiens; identical to SEQ ID NO: 2764
  misc_feature (21)..(21): a is present or absent.

SEQ ID NO: 6183 - DNA, 41 bp, Homo sapiens
ccgaacaggcaggagcctctmacttgccactgttcttaaca

SEQ ID NO: 6184 - DNA, 41 bp, Homo sapiens
catcaaagaaaataggggccwaattaagggagagcacatat

SEQ ID NO: 6185 - DNA, 41 bp, Homo sapiens
ctaattatattaagatcttamgatgaaccaagacagtagta

SEQ ID NO: 6186 - DNA, 41 bp, Homo sapiens
cagagtttcaccatgttggcyaggctggtcttgaactcctg

SEQ ID NO: 6187 - DNA, 41 bp, Homo sapiens
tatttcaaaagaataagactsttgccaaaaagtatcaagtg

SEQ ID NO: 6188 - DNA, 41 bp, Homo sapiens
aaaaaattactccaatagctyctgastttctcatcttagat

SEQ ID NO: 6189 - DNA, 41 bp, Homo sapiens
ctaattatctcagacatctgytcaaarcaaaaacatatatg

SEQ ID NO: 6190 - DNA, 41 bp, Homo sapiens
caataacaataagcaggtatygaaaaaactttgaaatgcat

SEQ ID NO: 6191 - DNA, 41 bp, Homo sapiens
ggcwgtttttacttcccatgyattggaataggtctatttag

SEQ ID NO: 6192 - DNA, 41 bp, Homo sapiens
gccctctctgaatgatctatrcaagtttttgctgaaaacac

SEQ ID NO: 6193 - DNA, 41 bp, Homo sapiens
tcagtaccttagtttggtacyagacatggtaatgactggct

SEQ ID NO: 6194 - DNA, 41 bp, Homo sapiens
aataaatatataggttattastaatttgctacttttttatt

SEQ ID NO: 6195 - DNA, 41 bp, Homo sapiens
gtgtggtgaatcaatgtgtgytgcttgtgggcagtactcca

SEQ ID NO: 6196 - DNA, 41 bp, Homo sapiens
ttttttaaaagttaatttttmttggggatttccctgcaggg

SEQ ID NO: 6197 - DNA, 41 bp, Homo sapiens
atcaaatttaactactttatrtttattttccagtcttagta

SEQ ID NO: 6198 - DNA, 41 bp, Homo sapiens
ttttaatgttgatatctttayatttatccttcagctataaa

SEQ ID NO: 6199 - DNA, 41 bp, Homo sapiens
tttccgaaagcttgccaaaamaggaaagaagaagaaaagag

SEQ ID NO: 6200 - DNA, 41 bp, Homo sapiens
ggatttaatacgtactttagytggaattattctatgtcwat

SEQ ID NO: 6201 - DNA, 41 bp, Homo sapiens
agytggaattattctatgtcwatgatttttaagctatgaaa

SEQ ID NO: 6202 - DNA, 43 bp, Homo sapiens
  misc_feature (21)..(23): agg is present or absent.
aagagagtagcagaataaggaggacaagggataaatgactagt

SEQ ID NO: 6203 - DNA, 40 bp, Homo sapiens
aagagagtagcagaataaggacaagggataaatgactagt

SEQ ID NO: 6204 - DNA, 55 bp, Homo sapiens
  misc_feature (32)..(35): a is present or absent.
ctagccaagtagatttagagaaaaaaaaaaaaaaacttgtctgctctgctgactt

SEQ ID NO: 6205 - DNA, 54 bp, Homo sapiens
  misc_feature (32)..(34): a is present or absent.
aagtataatttaaaaaaagcaaaaaaaaaaaaaatacaactcttttttttaaac

SEQ ID NO: 6206 - DNA, 41 bp, Homo sapiens
gcagaagtacaacctgctgcyggagaagtccatgtatgatt

SEQ ID NO: 6207 - DNA, 41 bp, Homo sapiens
atgctgtgtactgacgtagcrctggaattcccaagacccac

SEQ ID NO: 6208 - DNA, 42 bp, Homo sapiens
  misc_feature (21)..(22): gt is present or absent.
ttgacaatcaatatctccttgtttagtgcacaggtcccagta

SEQ ID NO: 6209 - DNA, 41 bp, Homo sapiens; identical to SEQ ID NO: 770

SEQ ID NO: 6210 - DNA, 41 bp, Homo sapiens; identical to SEQ ID NO: 771

SEQ ID NO: 6211 - DNA, 41 bp, Homo sapiens; identical to SEQ ID NO: 772

SEQ ID NO: 6212 - DNA, 41 bp, Homo sapiens; identical to SEQ ID NO: 773

SEQ ID NO: 6213 - DNA, 41 bp, Homo sapiens; identical to SEQ ID NO: 774

SEQ ID NO: 6214 - DNA, 41 bp, Homo sapiens; identical to SEQ ID NO: 775

SEQ ID NO: 6215 - DNA, 41 bp, Homo sapiens; identical to SEQ ID NO: 776

SEQ ID NO: 6216 - DNA, 41 bp, Homo sapiens; identical to SEQ ID NO: 777

SEQ ID NO: 6217 - DNA, 41 bp, Homo sapiens; identical to SEQ ID NO: 778

SEQ ID NO: 6218 - DNA, 41 bp, Homo sapiens; identical to SEQ ID NO: 779

SEQ ID NO: 6219 - DNA, 41 bp, Homo sapiens; identical to SEQ ID NO: 780

SEQ ID NO: 6220 - DNA, 41 bp, Homo sapiens
tgagctctgagagcaaatgaragatgttrgcaccctaaaca

SEQ ID NO: 6221 - DNA, 41 bp, Homo sapiens; identical to SEQ ID NO: 782

SEQ ID NO: 6222 - DNA, 41 bp, Homo sapiens; identical to SEQ ID NO: 783

SEQ ID NO: 6223 - DNA, 41 bp, Homo sapiens; identical to SEQ ID NO: 784

SEQ ID NO: 6224 - DNA, 42 bp, Homo sapiens; identical to SEQ ID NO: 785
  misc_feature (21)..(22): ta is present or absent.

SEQ ID NO: 6225 - DNA, 40 bp, Homo sapiens; identical to SEQ ID NO: 786

SEQ ID NO: 6226 - DNA, 41 bp, Homo sapiens; identical to SEQ ID NO: 681

SEQ ID NO: 6227 - DNA, 41 bp, Homo sapiens; identical to SEQ ID NO: 682

SEQ ID NO: 6228 - DNA, 41 bp, Homo sapiens; identical to SEQ ID NO: 683

SEQ ID NO: 6229 - DNA, 41 bp, Homo sapiens; identical to SEQ ID NO: 684

SEQ ID NO: 6230 - DNA, 41 bp, Homo sapiens; identical to SEQ ID NO: 685

SEQ ID NO: 6231 - DNA, 41 bp, Homo sapiens; identical to SEQ ID NO: 686

SEQ ID NO: 6232 - DNA, 41 bp, Homo sapiens; identical to SEQ ID NO: 687

SEQ ID NO: 6233 - DNA, 41 bp, Homo sapiens; identical to SEQ ID NO: 688

SEQ ID NO: 6234 - DNA, 41 bp, Homo sapiens; identical to SEQ ID NO: 689

SEQ ID NO: 6235 - DNA, 41 bp, Homo sapiens; identical to SEQ ID NO: 690

SEQ ID NO: 6236 - DNA, 41 bp, Homo sapiens; identical to SEQ ID NO: 691

SEQ ID NO: 6237 - DNA, 41 bp, Homo sapiens; identical to SEQ ID NO: 692

SEQ ID NO: 6238 - DNA, 41 bp, Homo sapiens; identical to SEQ ID NO: 693

SEQ ID NO: 6239 - DNA, 41 bp, Homo sapiens; identical to SEQ ID NO: 694

SEQ ID NO: 6240 - DNA, 41 bp, Homo sapiens; identical to SEQ ID NO: 695

SEQ ID NO: 6241 - DNA, 41 bp, Homo sapiens; identical to SEQ ID NO: 696

SEQ ID NO: 6242 - DNA, 41 bp, Homo sapiens; identical to SEQ ID NO: 697

SEQ ID NO: 6243 - DNA, 41 bp, Homo sapiens; identical to SEQ ID NO: 698

SEQ ID NO: 6244 - DNA, 41 bp, Homo sapiens; identical to SEQ ID NO: 699

SEQ ID NO: 6245 - DNA, 41 bp, Homo sapiens; identical to SEQ ID NO: 700

SEQ ID NO: 6246 - DNA, 41 bp, Homo sapiens; identical to SEQ ID NO: 701

SEQ ID NO: 6247 - DNA, 41 bp, Homo sapiens; identical to SEQ ID NO: 702

SEQ ID NO: 6248 - DNA, 41 bp, Homo sapiens; identical to SEQ ID NO: 703

SEQ ID NO: 6249 - DNA, 41 bp, Homo sapiens; identical to SEQ ID NO: 704

SEQ ID NO: 6250 - DNA, 41 bp, Homo sapiens; identical to SEQ ID NO: 705

SEQ ID NO: 6251 - DNA, 41 bp, Homo sapiens; identical to SEQ ID NO: 706

SEQ ID NO: 6252 - DNA, 41 bp, Homo sapiens; identical to SEQ ID NO: 707

SEQ ID NO: 6253 - DNA, 41 bp, Homo sapiens; identical to SEQ ID NO: 708

SEQ ID NO: 6254 - DNA, 41 bp, Homo sapiens; identical to SEQ ID NO: 709

SEQ ID NO: 6255 - DNA, 41 bp, Homo sapiens; identical to SEQ ID NO: 710

SEQ ID NO: 6256 - DNA, 41 bp, Homo sapiens; identical to SEQ ID NO: 711

SEQ ID NO: 6257 - DNA, 41 bp, Homo sapiens; identical to SEQ ID NO: 719

SEQ ID NO: 6258 - DNA, 41 bp, Homo sapiens; identical to SEQ ID NO: 720

SEQ ID NO: 6259 - DNA, 41 bp, Homo sapiens; identical to SEQ ID NO: 721

SEQ ID NO: 6260 - DNA, 41 bp, Homo sapiens; identical to SEQ ID NO: 722

SEQ ID NO: 6261 - DNA, 41 bp, Homo sapiens; identical to SEQ ID NO: 723

SEQ ID NO: 6262 - DNA, 41 bp, Homo sapiens; identical to SEQ ID NO: 724

SEQ ID NO: 6263 - DNA, 41 bp, Homo sapiens; identical to SEQ ID NO: 725

SEQ ID NO: 6264 - DNA, 41 bp, Homo sapiens; identical to SEQ ID NO: 726

SEQ ID NO: 6265 - DNA, 41 bp, Homo sapiens; identical to SEQ ID NO: 727

SEQ ID NO: 6266 - DNA, 41 bp, Homo sapiens; identical to SEQ ID NO: 728

SEQ ID NO: 6267 - DNA, 41 bp, Homo sapiens; identical to SEQ ID NO: 729

SEQ ID NO: 6268 - DNA, 41 bp, Homo sapiens; identical to SEQ ID NO: 730

SEQ ID NO: 6269 - DNA, 41 bp, Homo sapiens; identical to SEQ ID NO: 731

SEQ ID NO: 6270 - DNA, 41 bp, Homo sapiens; identical to SEQ ID NO: 732

SEQ ID NO: 6271 - DNA, 41 bp, Homo sapiens; identical to SEQ ID NO: 2663

SEQ ID NO: 6272 - DNA, 41 bp, Homo sapiens; identical to SEQ ID NO: 635

SEQ ID NO: 6273 - DNA, 41 bp, Homo sapiens; identical to SEQ ID NO: 2664

SEQ ID NO: 6274 - DNA, 41 bp, Homo sapiens; identical to SEQ ID NO: 636

SEQ ID NO: 6275 - DNA, 41 bp, Homo sapiens; identical to SEQ ID NO: 668

SEQ ID NO: 6276 - DNA, 41 bp, Homo sapiens; identical to SEQ ID NO: 2666

SEQ ID NO: 6277 - DNA, 41 bp, Homo sapiens; identical to SEQ ID NO: 2667

SEQ ID NO: 6278 - DNA, 41 bp, Homo sapiens; identical to SEQ ID NO: 2668

SEQ ID NO: 6279 - DNA, 41 bp, Homo sapiens; identical to SEQ ID NO: 637

SEQ ID NO: 6280 - DNA, 41 bp, Homo sapiens
ctcatcaggtgtgtgtcagakgcttggtgctggccagtctc

SEQ ID NO: 6281 - DNA, 41 bp, Homo sapiens; identical to SEQ ID NO: 640

SEQ ID NO: 6282 - DNA, 41 bp, Homo sapiens
tgtaatagattaacaaaggtkatgaaagtagtgtacataat

SEQ ID NO: 6283 - DNA, 41 bp, Homo sapiens; identical to SEQ ID NO: 646

SEQ ID NO: 6284 - DNA, 41 bp, Homo sapiens; identical to SEQ ID NO: 649

SEQ ID NO: 6285 - DNA, 41 bp, Homo sapiens; identical to SEQ ID NO: 650

SEQ ID NO: 6286 - DNA, 41 bp, Homo sapiens; identical to SEQ ID NO: 651

SEQ ID NO: 6287 - DNA, 41 bp, Homo sapiens; identical to SEQ ID NO: 2669

SEQ ID NO: 6288 - DNA, 41 bp, Homo sapiens; identical to SEQ ID NO: 2670

SEQ ID NO: 6289 - DNA, 41 bp, Homo sapiens; identical to SEQ ID NO: 654

SEQ ID NO: 6290 - DNA, 41 bp, Homo sapiens; identical to SEQ ID NO: 2671

SEQ ID NO: 6291 - DNA, 41 bp, Homo sapiens; identical to SEQ ID NO: 655

SEQ ID NO: 6292 - DNA, 41 bp, Homo sapiens; identical to SEQ ID NO: 2672

SEQ ID NO: 6293 - DNA, 41 bp, Homo sapiens; identical to SEQ ID NO: 657

SEQ ID NO: 6294 - DNA, 41 bp, Homo sapiens; identical to SEQ ID NO: 2673

SEQ ID NO: 6295 - DNA, 41 bp, Homo sapiens; identical to SEQ ID NO: 2674

SEQ ID NO: 6296 - DNA, 41 bp, Homo sapiens; identical to SEQ ID NO: 2675

SEQ ID NO: 6297 - DNA, 41 bp, Homo sapiens; identical to SEQ ID NO: 2677

SEQ ID NO: 6298 - DNA, 41 bp, Homo sapiens; identical to SEQ ID NO: 659

SEQ ID NO: 6299 - DNA, 41 bp, Homo sapiens; identical to SEQ ID NO: 2678

SEQ ID NO: 6300 - DNA, 41 bp, Homo sapiens; identical to SEQ ID NO: 661

SEQ ID NO: 6301 - DNA, 41 bp, Homo sapiens; identical to SEQ ID NO: 2679

SEQ ID NO: 6302 - DNA, 41 bp, Homo sapiens; identical to SEQ ID NO: 662

SEQ ID NO: 6303 - DNA, 41 bp, Homo sapiens; identical to SEQ ID NO: 663

SEQ ID NO: 6304 - DNA, 41 bp, Homo sapiens; identical to SEQ ID NO: 669

SEQ ID NO: 6305 - DNA, 41 bp, Homo sapiens; identical to SEQ ID NO: 2681

SEQ ID NO: 6306 - DNA, 41 bp, Homo sapiens; identical to SEQ ID NO: 2682

SEQ ID NO: 6307 - DNA, 59 bp, Homo sapiens
  misc_feature (37)..(39): a is present or absent.
tgcgattatctttggtaattaaaaaaaaaaaaaaaaaaaggcaaatcagtccaaatttg

SEQ ID NO: 6308 - DNA, 42 bp, Homo sapiens; identical to SEQ ID NO: 2686
  misc_feature (21)..(21): aa is present or absent.

SEQ ID NO: 6309 - DNA, 40 bp, Homo sapiens; identical to SEQ ID NO: 2687

SEQ ID NO: 6310 - DNA, 41 bp, Homo sapiens; identical to SEQ ID NO: 2688
  misc_feature (21)..(21): t is present or absent.

SEQ ID NO: 6311 - DNA, 52 bp, Homo sapiens
  misc_feature (31)..(32): t is present or absent.
cccagcattataagaatgacttttttttttttaagtgcagatgtggggaggg

SEQ ID NO: 6312 - DNA, 42 bp, Homo sapiens; identical to SEQ ID NO: 2690
  misc_feature (21)..(22): aa is present or absent.

SEQ ID NO: 6313 - DNA, 55 bp, Homo sapiens
  misc_feature (21)..(21): n is t or g or absent.
  misc_feature (22)..(22): n is t or absent.
  misc_feature (23)..(23): n is g or c or absent.
  misc_feature (24)..(24): n is a or c or absent.
  misc_feature (25)..(25): n is c or a or absent.
  misc_feature (26)..(26): n is a or absent.
  misc_feature (27)..(27): n is g or t or absent.
  misc_feature (28)..(28): n is t or a or absent.
  misc_feature (29)..(29): n is c or  t or absent.
  misc_feature (30)..(30): n is c or absent.
  misc_feature (31)..(31): n is a or absent.
  misc_feature (32)..(32): n is a or absent.
  misc_feature (33)..(33): n is t or absent.
  misc_feature (34)..(34): n is a or absent.
  misc_feature (35)..(35): n is t or absent.
agaaaactggatgtctgaaannnnnnnnnnnnnnncactgcacttgtatgtgttg

SEQ ID NO: 6314 - DNA, 43 bp, Homo sapiens; identical to SEQ ID NO: 2692
  misc_feature (21)..(23): cta is present or absent.

SEQ ID NO: 6315 - DNA, 41 bp, Homo sapiens
  misc_feature (21)..(21): a is present or absent.
ccctttccatttttaagttaagacttttttttttcacctct

SEQ ID NO: 6316 - DNA, 40 bp, Homo sapiens
ccctttccatttttaagttagacttttttttttcacctct

SEQ ID NO: 6317 - DNA, 51 bp, Homo sapiens
  misc_feature (30)..(31): t is present or absent.
tttccatttttaagttagactttttttttttcacctctctcgttacttcag

SEQ ID NO: 6318 - DNA, 41 bp, Homo sapiens
  misc_feature (21)..(21): c is present or absent.
ggtttatagtgttcccccccctccccgcccccaaaagaccc

SEQ ID NO: 6319 - DNA, 40 bp, Homo sapiens
ggtttatagtgttccccccctccccgcccccaaaagaccc

SEQ ID NO: 6320 - DNA, 59 bp, Homo sapiens; identical to SEQ ID NO: 2694
  misc_feature (21)..(39): gagatgttgt ggctcacat is present or absent.

SEQ ID NO: 6321 - DNA, 40 bp, Homo sapiens; identical to SEQ ID NO: 2695

SEQ ID NO: 6322 - DNA, 42 bp, Homo sapiens; identical to SEQ ID NO: 2696
  misc_feature (21)..(22): cc is present or absent.

SEQ ID NO: 6323 - DNA, 43 bp, Homo sapiens; identical to SEQ ID NO: 2697
  misc_feature (21)..(23): act is present or absent.

SEQ ID NO: 6324 - DNA, 41 bp, Homo sapiens; identical to SEQ ID NO: 733

SEQ ID NO: 6325 - DNA, 41 bp, Homo sapiens; identical to SEQ ID NO: 734

SEQ ID NO: 6326 - DNA, 41 bp, Homo sapiens; identical to SEQ ID NO: 735

SEQ ID NO: 6327 - DNA, 41 bp, Homo sapiens; identical to SEQ ID NO: 736

SEQ ID NO: 6328 - DNA, 41 bp, Homo sapiens; identical to SEQ ID NO: 737

SEQ ID NO: 6329 - DNA, 41 bp, Homo sapiens; identical to SEQ ID NO: 738

SEQ ID NO: 6330 - DNA, 41 bp, Homo sapiens; identical to SEQ ID NO: 739

SEQ ID NO: 6331 - DNA, 41 bp, Homo sapiens; identical to SEQ ID NO: 740

SEQ ID NO: 6332 - DNA, 41 bp, Homo sapiens; identical to SEQ ID NO: 741

SEQ ID NO: 6333 - DNA, 41 bp, Homo sapiens; identical to SEQ ID NO: 742

SEQ ID NO: 6334 - DNA, 41 bp, Homo sapiens; identical to SEQ ID NO: 743

SEQ ID NO: 6335 - DNA, 41 bp, Homo sapiens; identical to SEQ ID NO: 744

SEQ ID NO: 6336 - DNA, 41 bp, Homo sapiens; identical to SEQ ID NO: 745

SEQ ID NO: 6337 - DNA, 41 bp, Homo sapiens; identical to SEQ ID NO: 746

SEQ ID NO: 6338 - DNA, 41 bp, Homo sapiens; identical to SEQ ID NO: 747

SEQ ID NO: 6339 - DNA, 41 bp, Homo sapiens; identical to SEQ ID NO: 748

SEQ ID NO: 6340 - DNA, 41 bp, Homo sapiens; identical to SEQ ID NO: 749

SEQ ID NO: 6341 - DNA, 41 bp, Homo sapiens; identical to SEQ ID NO: 750

SEQ ID NO: 6342 - DNA, 41 bp, Homo sapiens; identical to SEQ ID NO: 751

SEQ ID NO: 6343 - DNA, 41 bp, Homo sapiens; identical to SEQ ID NO: 752

SEQ ID NO: 6344 - DNA, 41 bp, Homo sapiens; identical to SEQ ID NO: 753

SEQ ID NO: 6345 - DNA, 41 bp, Homo sapiens; identical to SEQ ID NO: 754

SEQ ID NO: 6346 - DNA, 41 bp, Homo sapiens; identical to SEQ ID NO: 755

SEQ ID NO: 6347 - DNA, 41 bp, Homo sapiens; identical to SEQ ID NO: 756

SEQ ID NO: 6348 - DNA, 41 bp, Homo sapiens; identical to SEQ ID NO: 757

SEQ ID NO: 6349 - DNA, 41 bp, Homo sapiens; identical to SEQ ID NO: 758

SEQ ID NO: 6350 - DNA, 41 bp, Homo sapiens; identical to SEQ ID NO: 759

SEQ ID NO: 6351 - DNA, 41 bp, Homo sapiens; identical to SEQ ID NO: 760

SEQ ID NO: 6352 - DNA, 41 bp, Homo sapiens; identical to SEQ ID NO: 761

SEQ ID NO: 6353 - DNA, 41 bp, Homo sapiens; identical to SEQ ID NO: 762

SEQ ID NO: 6354 - DNA, 41 bp, Homo sapiens; identical to SEQ ID NO: 763

SEQ ID NO: 6355 - DNA, 41 bp, Homo sapiens; identical to SEQ ID NO: 764

SEQ ID NO: 6356 - DNA, 41 bp, Homo sapiens; identical to SEQ ID NO: 765

SEQ ID NO: 6357 - DNA, 41 bp, Homo sapiens; identical to SEQ ID NO: 766

SEQ ID NO: 6358 - DNA, 41 bp, Homo sapiens; identical to SEQ ID NO: 767

SEQ ID NO: 6359 - DNA, 41 bp, Homo sapiens; identical to SEQ ID NO: 768

SEQ ID NO: 6360 - DNA, 41 bp, Homo sapiens; identical to SEQ ID NO: 769

SEQ ID NO: 6361 - DNA, 41 bp, Homo sapiens; identical to SEQ ID NO: 253

SEQ ID NO: 6362 - DNA, 41 bp, Homo sapiens; identical to SEQ ID NO: 254

SEQ ID NO: 6363 - DNA, 41 bp, Homo sapiens
cggtttcatatgttactgatyrtacartgagatcctaggtg

SEQ ID NO: 6364 - DNA, 41 bp, Homo sapiens
ggtttcatatgttactgatyrtacartgagatcctaggtga

SEQ ID NO: 6365 - DNA, 41 bp, Homo sapiens
catatgttactgatyrtacartgagatcctaggtgaaacct

SEQ ID NO: 6366 - DNA, 41 bp, Homo sapiens; identical to SEQ ID NO: 258

SEQ ID NO: 6367 - DNA, 41 bp, Homo sapiens; identical to SEQ ID NO: 259

SEQ ID NO: 6368 - DNA, 41 bp, Homo sapiens; identical to SEQ ID NO: 260

SEQ ID NO: 6369 - DNA, 41 bp, Homo sapiens; identical to SEQ ID NO: 261

SEQ ID NO: 6370 - DNA, 41 bp, Homo sapiens; identical to SEQ ID NO: 262

SEQ ID NO: 6371 - DNA, 41 bp, Homo sapiens
ctggttttcagccccagcccygccactgastggctttgtga

SEQ ID NO: 6372 - DNA, 41 bp, Homo sapiens
agccccagcccygccactgastggctttgtgagtgcgggca

SEQ ID NO: 6373 - DNA, 41 bp, Homo sapiens; identical to SEQ ID NO: 265

SEQ ID NO: 6374 - DNA, 41 bp, Homo sapiens
catgaaggaggtgagaccacstgtgawgcttccctccatgt

SEQ ID NO: 6375 - DNA, 41 bp, Homo sapiens
ggaggtgagaccacstgtgawgcttccctccatgtgacacc

SEQ ID NO: 6376 - DNA, 41 bp, Homo sapiens; identical to SEQ ID NO: 268

SEQ ID NO: 6377 - DNA, 41 bp, Homo sapiens; identical to SEQ ID NO: 269

SEQ ID NO: 6378 - DNA, 41 bp, Homo sapiens
ttggcagcccccacagcaggmccrgattccccatcctgcct

SEQ ID NO: 6379 - DNA, 41 bp, Homo sapiens
gcagcccccacagcaggmccrgattccccatcctgccttct

SEQ ID NO: 6380 - DNA, 41 bp, Homo sapiens; identical to SEQ ID NO: 272

SEQ ID NO: 6381 - DNA, 41 bp, Homo sapiens; identical to SEQ ID NO: 273

SEQ ID NO: 6382 - DNA, 41 bp, Homo sapiens; identical to SEQ ID NO: 274

SEQ ID NO: 6383 - DNA, 41 bp, Homo sapiens; identical to SEQ ID NO: 275

SEQ ID NO: 6384 - DNA, 41 bp, Homo sapiens
gatcctggagtttgtggggcrctccctgccagaggagaccg

SEQ ID NO: 6385 - DNA, 41 bp, Homo sapiens; identical to SEQ ID NO: 276

SEQ ID NO: 6386 - DNA, 41 bp, Homo sapiens; identical to SEQ ID NO: 277

SEQ ID NO: 6387 - DNA, 41 bp, Homo sapiens
taaaatatgaattgagggccygggacggtaggtcatgtctg

SEQ ID NO: 6388 - DNA, 41 bp, Homo sapiens; identical to SEQ ID NO: 278

SEQ ID NO: 6389 - DNA, 41 bp, Homo sapiens; identical to SEQ ID NO: 279

SEQ ID NO: 6390 - DNA, 41 bp, Homo sapiens
ctttccagggcctgcctatcycakctttctcctccaatccc

SEQ ID NO: 6391 - DNA, 41 bp, Homo sapiens
tccagggcctgcctatcycakctttctcctccaatccctcc

SEQ ID NO: 6392 - DNA, 41 bp, Homo sapiens; identical to SEQ ID NO: 282

SEQ ID NO: 6393 - DNA, 41 bp, Homo sapiens; identical to SEQ ID NO: 283

SEQ ID NO: 6394 - DNA, 41 bp, Homo sapiens
catggagctgatccaggacayctcycgcccgccactggagt

SEQ ID NO: 6395 - DNA, 41 bp, Homo sapiens
gagctgatccaggacayctcycgcccgccactggagtacgt

SEQ ID NO: 6396 - DNA, 41 bp, Homo sapiens; identical to SEQ ID NO: 285

SEQ ID NO: 6397 - DNA, 41 bp, Homo sapiens; identical to SEQ ID NO: 286

SEQ ID NO: 6398 - DNA, 41 bp, Homo sapiens; identical to SEQ ID NO: 287

SEQ ID NO: 6399 - DNA, 41 bp, Homo sapiens
gttcaaggagatgaagaagamccctatgaccaactacacca

SEQ ID NO: 6400 - DNA, 41 bp, Homo sapiens; identical to SEQ ID NO: 288

SEQ ID NO: 6401 - DNA, 41 bp, Homo sapiens; identical to SEQ ID NO: 289

SEQ ID NO: 6402 - DNA, 41 bp, Homo sapiens; identical to SEQ ID NO: 290

SEQ ID NO: 6403 - DNA, 41 bp, Homo sapiens; identical to SEQ ID NO: 291

SEQ ID NO: 6404 - DNA, 41 bp, Homo sapiens; identical to SEQ ID NO: 292

SEQ ID NO: 6405 - DNA, 41 bp, Homo sapiens; identical to SEQ ID NO: 671
  misc_feature (21)..(21): a is present or absent.

SEQ ID NO: 6406 - DNA, 41 bp, Homo sapiens; identical to SEQ ID NO: 365

SEQ ID NO: 6407 - DNA, 41 bp, Homo sapiens; identical to SEQ ID NO: 376

SEQ ID NO: 6408 - DNA, 41 bp, Homo sapiens; identical to SEQ ID NO: 377

SEQ ID NO: 6409 - DNA, 41 bp, Homo sapiens; identical to SEQ ID NO: 378

SEQ ID NO: 6410 - DNA, 41 bp, Homo sapiens; identical to SEQ ID NO: 379

SEQ ID NO: 6411 - DNA, 41 bp, Homo sapiens; identical to SEQ ID NO: 380

SEQ ID NO: 6412 - DNA, 41 bp, Homo sapiens; identical to SEQ ID NO: 381

SEQ ID NO: 6413 - DNA, 41 bp, Homo sapiens; identical to SEQ ID NO: 382

SEQ ID NO: 6414 - DNA, 41 bp, Homo sapiens; identical to SEQ ID NO: 383

SEQ ID NO: 6415 - DNA, 51 bp, Homo sapiens
  misc_feature (29)..(31): t is present or absent.
tgcagtggtcgtttgtttggtttttttttttgagacaaagtctggctctgt

SEQ ID NO: 6416 - DNA, 53 bp, Homo sapiens
  misc_feature (31)..(33): t is present or absent.
atgcccagctaattttggtatttttttttttttagagacaggatttcaccatg

SEQ ID NO: 6417 - DNA, 41 bp, Homo sapiens; identical to SEQ ID NO: 384

SEQ ID NO: 6418 - DNA, 41 bp, Homo sapiens; identical to SEQ ID NO: 385

SEQ ID NO: 6419 - DNA, 41 bp, Homo sapiens; identical to SEQ ID NO: 386

SEQ ID NO: 6420 - DNA, 41 bp, Homo sapiens; identical to SEQ ID NO: 387

SEQ ID NO: 6421 - DNA, 41 bp, Homo sapiens; identical to SEQ ID NO: 388

SEQ ID NO: 6422 - DNA, 41 bp, Homo sapiens; identical to SEQ ID NO: 389

SEQ ID NO: 6423 - DNA, 41 bp, Homo sapiens; identical to SEQ ID NO: 390

SEQ ID NO: 6424 - DNA, 41 bp, Homo sapiens; identical to SEQ ID NO: 391

SEQ ID NO: 6425 - DNA, 41 bp, Homo sapiens; identical to SEQ ID NO: 392

SEQ ID NO: 6426 - DNA, 41 bp, Homo sapiens; identical to SEQ ID NO: 393

SEQ ID NO: 6427 - DNA, 41 bp, Homo sapiens; identical to SEQ ID NO: 394

SEQ ID NO: 6428 - DNA, 41 bp, Homo sapiens; identical to SEQ ID NO: 415

SEQ ID NO: 6429 - DNA, 41 bp, Homo sapiens; identical to SEQ ID NO: 416

SEQ ID NO: 6430 - DNA, 41 bp, Homo sapiens; identical to SEQ ID NO: 417

SEQ ID NO: 6431 - DNA, 41 bp, Homo sapiens; identical to SEQ ID NO: 418

SEQ ID NO: 6432 - DNA, 41 bp, Homo sapiens; identical to SEQ ID NO: 419

SEQ ID NO: 6433 - DNA, 41 bp, Homo sapiens
ttccttgttaaaagttaccasggttggccaggcrcggtggt

SEQ ID NO: 6434 - DNA, 41 bp, Homo sapiens
gttaccasggttggccaggcrcggtggttcatgcctgtaat

SEQ ID NO: 6435 - DNA, 41 bp, Homo sapiens; identical to SEQ ID NO: 422

SEQ ID NO: 6436 - DNA, 41 bp, Homo sapiens; identical to SEQ ID NO: 423

SEQ ID NO: 6437 - DNA, 41 bp, Homo sapiens; identical to SEQ ID NO: 424

SEQ ID NO: 6438 - DNA, 41 bp, Homo sapiens; identical to SEQ ID NO: 425

SEQ ID NO: 6439 - DNA, 41 bp, Homo sapiens; identical to SEQ ID NO: 426

SEQ ID NO: 6440 - DNA, 41 bp, Homo sapiens; identical to SEQ ID NO: 427

SEQ ID NO: 6441 - DNA, 41 bp, Homo sapiens; identical to SEQ ID NO: 428

SEQ ID NO: 6442 - DNA, 41 bp, Homo sapiens; identical to SEQ ID NO: 293

SEQ ID NO: 6443 - DNA, 41 bp, Homo sapiens; identical to SEQ ID NO: 294

SEQ ID NO: 6444 - DNA, 41 bp, Homo sapiens; identical to SEQ ID NO: 295

SEQ ID NO: 6445 - DNA, 41 bp, Homo sapiens; identical to SEQ ID NO: 296

SEQ ID NO: 6446 - DNA, 41 bp, Homo sapiens; identical to SEQ ID NO: 297

SEQ ID NO: 6447 - DNA, 41 bp, Homo sapiens; identical to SEQ ID NO: 298

SEQ ID NO: 6448 - DNA, 41 bp, Homo sapiens; identical to SEQ ID NO: 299

SEQ ID NO: 6449 - DNA, 41 bp, Homo sapiens; identical to SEQ ID NO: 300

SEQ ID NO: 6450 - DNA, 41 bp, Homo sapiens; identical to SEQ ID NO: 301

SEQ ID NO: 6451 - DNA, 41 bp, Homo sapiens; identical to SEQ ID NO: 302

SEQ ID NO: 6452 - DNA, 41 bp, Homo sapiens; identical to SEQ ID NO: 303

SEQ ID NO: 6453 - DNA, 41 bp, Homo sapiens
agacagaggctggggccaagycagggttgccggagcttccc

SEQ ID NO: 6454 - DNA, 41 bp, Homo sapiens; identical to SEQ ID NO: 305

SEQ ID NO: 6455 - DNA, 41 bp, Homo sapiens; identical to SEQ ID NO: 306

SEQ ID NO: 6456 - DNA, 41 bp, Homo sapiens; identical to SEQ ID NO: 307

SEQ ID NO: 6457 - DNA, 41 bp, Homo sapiens; identical to SEQ ID NO: 308

SEQ ID NO: 6458 - DNA, 41 bp, Homo sapiens; identical to SEQ ID NO: 309

SEQ ID NO: 6459 - DNA, 41 bp, Homo sapiens; identical to SEQ ID NO: 310

SEQ ID NO: 6460 - DNA, 41 bp, Homo sapiens; identical to SEQ ID NO: 311

SEQ ID NO: 6461 - DNA, 41 bp, Homo sapiens; identical to SEQ ID NO: 312

SEQ ID NO: 6462 - DNA, 41 bp, Homo sapiens; identical to SEQ ID NO: 313

SEQ ID NO: 6463 - DNA, 41 bp, Homo sapiens; identical to SEQ ID NO: 314

SEQ ID NO: 6464 - DNA, 41 bp, Homo sapiens; identical to SEQ ID NO: 315

SEQ ID NO: 6465 - DNA, 41 bp, Homo sapiens; identical to SEQ ID NO: 316

SEQ ID NO: 6466 - DNA, 41 bp, Homo sapiens; identical to SEQ ID NO: 317

SEQ ID NO: 6467 - DNA, 41 bp, Homo sapiens; identical to SEQ ID NO: 318

SEQ ID NO: 6468 - DNA, 41 bp, Homo sapiens; identical to SEQ ID NO: 319

SEQ ID NO: 6469 - DNA, 41 bp, Homo sapiens; identical to SEQ ID NO: 320

SEQ ID NO: 6470 - DNA, 41 bp, Homo sapiens; identical to SEQ ID NO: 321

SEQ ID NO: 6471 - DNA, 41 bp, Homo sapiens; identical to SEQ ID NO: 322

SEQ ID NO: 6472 - DNA, 41 bp, Homo sapiens
  misc_feature (21)..(21): g is present or absent.
ctctccctgttagtgtgggggcagctctttccagtgtcctg

SEQ ID NO: 6473 - DNA, 41 bp, Homo sapiens
  misc_feature (21)..(21): c is present or absent.
cccttaaagggaagttcatccttctctgccttccaggctcc

SEQ ID NO: 6474 - DNA, 41 bp, Homo sapiens; identical to SEQ ID NO: 323

SEQ ID NO: 6475 - DNA, 41 bp, Homo sapiens; identical to SEQ ID NO: 324

SEQ ID NO: 6476 - DNA, 41 bp, Homo sapiens; identical to SEQ ID NO: 325

SEQ ID NO: 6477 - DNA, 41 bp, Homo sapiens; identical to SEQ ID NO: 326

SEQ ID NO: 6478 - DNA, 41 bp, Homo sapiens; identical to SEQ ID NO: 327

SEQ ID NO: 6479 - DNA, 41 bp, Homo sapiens; identical to SEQ ID NO: 328

SEQ ID NO: 6480 - DNA, 41 bp, Homo sapiens; identical to SEQ ID NO: 329

SEQ ID NO: 6481 - DNA, 41 bp, Homo sapiens; identical to SEQ ID NO: 330

SEQ ID NO: 6482 - DNA, 41 bp, Homo sapiens; identical to SEQ ID NO: 331

SEQ ID NO: 6483 - DNA, 41 bp, Homo sapiens; identical to SEQ ID NO: 332

SEQ ID NO: 6484 - DNA, 41 bp, Homo sapiens; identical to SEQ ID NO: 333

SEQ ID NO: 6485 - DNA, 41 bp, Homo sapiens; identical to SEQ ID NO: 334

SEQ ID NO: 6486 - DNA, 41 bp, Homo sapiens; identical to SEQ ID NO: 335

SEQ ID NO: 6487 - DNA, 41 bp, Homo sapiens; identical to SEQ ID NO: 336

SEQ ID NO: 6488 - DNA, 41 bp, Homo sapiens; identical to SEQ ID NO: 337

SEQ ID NO: 6489 - DNA, 41 bp, Homo sapiens; identical to SEQ ID NO: 338

SEQ ID NO: 6490 - DNA, 41 bp, Homo sapiens; identical to SEQ ID NO: 339

SEQ ID NO: 6491 - DNA, 41 bp, Homo sapiens; identical to SEQ ID NO: 340

SEQ ID NO: 6492 - DNA, 41 bp, Homo sapiens; identical to SEQ ID NO: 341

SEQ ID NO: 6493 - DNA, 41 bp, Homo sapiens; identical to SEQ ID NO: 342

SEQ ID NO: 6494 - DNA, 41 bp, Homo sapiens; identical to SEQ ID NO: 343

SEQ ID NO: 6495 - DNA, 41 bp, Homo sapiens
cccaggctggagtgtagtggygtgatctyggctcactgcaa

SEQ ID NO: 6496 - DNA, 41 bp, Homo sapiens
ggagtgtagtggygtgatctyggctcactgcaacctccgcc

SEQ ID NO: 6497 - DNA, 41 bp, Homo sapiens; identical to SEQ ID NO: 346

SEQ ID NO: 6498 - DNA, 41 bp, Homo sapiens; identical to SEQ ID NO: 347

SEQ ID NO: 6499 - DNA, 41 bp, Homo sapiens; identical to SEQ ID NO: 348

SEQ ID NO: 6500 - DNA, 41 bp, Homo sapiens; identical to SEQ ID NO: 349

SEQ ID NO: 6501 - DNA, 41 bp, Homo sapiens; identical to SEQ ID NO: 350

SEQ ID NO: 6502 - DNA, 41 bp, Homo sapiens; identical to SEQ ID NO: 351

SEQ ID NO: 6503 - DNA, 41 bp, Homo sapiens; identical to SEQ ID NO: 352

SEQ ID NO: 6504 - DNA, 41 bp, Homo sapiens; identical to SEQ ID NO: 353

SEQ ID NO: 6505 - DNA, 41 bp, Homo sapiens; identical to SEQ ID NO: 354

SEQ ID NO: 6506 - DNA, 41 bp, Homo sapiens; identical to SEQ ID NO: 355

SEQ ID NO: 6507 - DNA, 41 bp, Homo sapiens; identical to SEQ ID NO: 356

SEQ ID NO: 6508 - DNA, 41 bp, Homo sapiens; identical to SEQ ID NO: 357

SEQ ID NO: 6509 - DNA, 41 bp, Homo sapiens; identical to SEQ ID NO: 358

SEQ ID NO: 6510 - DNA, 41 bp, Homo sapiens; identical to SEQ ID NO: 359

SEQ ID NO: 6511 - DNA, 41 bp, Homo sapiens; identical to SEQ ID NO: 360

SEQ ID NO: 6512 - DNA, 41 bp, Homo sapiens; identical to SEQ ID NO: 361

SEQ ID NO: 6513 - DNA, 41 bp, Homo sapiens; identical to SEQ ID NO: 362

SEQ ID NO: 6514 - DNA, 41 bp, Homo sapiens; identical to SEQ ID NO: 363

SEQ ID NO: 6515 - DNA, 41 bp, Homo sapiens; identical to SEQ ID NO: 364

SEQ ID NO: 6516 - DNA, 41 bp, Homo sapiens; identical to SEQ ID NO: 366

SEQ ID NO: 6517 - DNA, 41 bp, Homo sapiens; identical to SEQ ID NO: 367

SEQ ID NO: 6518 - DNA, 41 bp, Homo sapiens; identical to SEQ ID NO: 368

SEQ ID NO: 6519 - DNA, 41 bp, Homo sapiens; identical to SEQ ID NO: 369

SEQ ID NO: 6520 - DNA, 41 bp, Homo sapiens; identical to SEQ ID NO: 370

SEQ ID NO: 6521 - DNA, 41 bp, Homo sapiens; identical to SEQ ID NO: 371

SEQ ID NO: 6522 - DNA, 41 bp, Homo sapiens; identical to SEQ ID NO: 372

SEQ ID NO: 6523 - DNA, 41 bp, Homo sapiens; identical to SEQ ID NO: 373

SEQ ID NO: 6524 - DNA, 41 bp, Homo sapiens; identical to SEQ ID NO: 374

SEQ ID NO: 6525 - DNA, 41 bp, Homo sapiens; identical to SEQ ID NO: 375

SEQ ID NO: 6526 - DNA, 41 bp, Homo sapiens; identical to SEQ ID NO: 395

SEQ ID NO: 6527 - DNA, 41 bp, Homo sapiens; identical to SEQ ID NO: 396

SEQ ID NO: 6528 - DNA, 41 bp, Homo sapiens; identical to SEQ ID NO: 397

SEQ ID NO: 6529 - DNA, 41 bp, Homo sapiens
gtacttgacattaaaaaatayctgatgtttrtatatccata

SEQ ID NO: 6530 - DNA, 41 bp, Homo sapiens
ttaaaaaatayctgatgtttrtatatccataaatagctaat

SEQ ID NO: 6531 - DNA, 41 bp, Homo sapiens; identical to SEQ ID NO: 400

SEQ ID NO: 6532 - DNA, 41 bp, Homo sapiens; identical to SEQ ID NO: 401

SEQ ID NO: 6533 - DNA, 41 bp, Homo sapiens; identical to SEQ ID NO: 402

SEQ ID NO: 6534 - DNA, 41 bp, Homo sapiens; identical to SEQ ID NO: 403

SEQ ID NO: 6535 - DNA, 41 bp, Homo sapiens; identical to SEQ ID NO: 404

SEQ ID NO: 6536 - DNA, 41 bp, Homo sapiens; identical to SEQ ID NO: 405

SEQ ID NO: 6537 - DNA, 41 bp, Homo sapiens; identical to SEQ ID NO: 406

SEQ ID NO: 6538 - DNA, 41 bp, Homo sapiens; identical to SEQ ID NO: 407

SEQ ID NO: 6539 - DNA, 41 bp, Homo sapiens; identical to SEQ ID NO: 408

SEQ ID NO: 6540 - DNA, 41 bp, Homo sapiens; identical to SEQ ID NO: 409

SEQ ID NO: 6541 - DNA, 41 bp, Homo sapiens; identical to SEQ ID NO: 2509

SEQ ID NO: 6542 - DNA, 41 bp, Homo sapiens; identical to SEQ ID NO: 2510

SEQ ID NO: 6543 - DNA, 41 bp, Homo sapiens; identical to SEQ ID NO: 2513

SEQ ID NO: 6544 - DNA, 41 bp, Homo sapiens; identical to SEQ ID NO: 2514

SEQ ID NO: 6545 - DNA, 41 bp, Homo sapiens; identical to SEQ ID NO: 2515

SEQ ID NO: 6546 - DNA, 41 bp, Homo sapiens; identical to SEQ ID NO: 2516

SEQ ID NO: 6547 - DNA, 41 bp, Homo sapiens; identical to SEQ ID NO: 2517

SEQ ID NO: 6548 - DNA, 41 bp, Homo sapiens; identical to SEQ ID NO: 2518

SEQ ID NO: 6549 - DNA, 41 bp, Homo sapiens; identical to SEQ ID NO: 2519

SEQ ID NO: 6550 - DNA, 41 bp, Homo sapiens; identical to SEQ ID NO: 2520

SEQ ID NO: 6551 - DNA, 41 bp, Homo sapiens; identical to SEQ ID NO: 2521

SEQ ID NO: 6552 - DNA, 41 bp, Homo sapiens; identical to SEQ ID NO: 2522

SEQ ID NO: 6553 - DNA, 41 bp, Homo sapiens; identical to SEQ ID NO: 2523

SEQ ID NO: 6554 - DNA, 41 bp, Homo sapiens; identical to SEQ ID NO: 2524
  misc_feature (21)..(21): t is present or absent.

SEQ ID NO: 6555 - DNA, 55 bp, Homo sapiens; identical to SEQ ID NO: 2525
  misc_feature (33)..(35): t is present or absent.

SEQ ID NO: 6556 - DNA, 41 bp, Homo sapiens; identical to SEQ ID NO: 410

SEQ ID NO: 6557 - DNA, 41 bp, Homo sapiens; identical to SEQ ID NO: 411

SEQ ID NO: 6558 - DNA, 41 bp, Homo sapiens; identical to SEQ ID NO: 412

SEQ ID NO: 6559 - DNA, 41 bp, Homo sapiens; identical to SEQ ID NO: 413

SEQ ID NO: 6560 - DNA, 41 bp, Homo sapiens; identical to SEQ ID NO: 414

SEQ ID NO: 6561 - DNA, 41 bp, Homo sapiens; identical to SEQ ID NO: 2526

SEQ ID NO: 6562 - DNA, 41 bp, Homo sapiens; identical to SEQ ID NO: 2527

SEQ ID NO: 6563 - DNA, 41 bp, Homo sapiens; identical to SEQ ID NO: 2528

SEQ ID NO: 6564 - DNA, 41 bp, Homo sapiens; identical to SEQ ID NO: 2529

SEQ ID NO: 6565 - DNA, 41 bp, Homo sapiens; identical to SEQ ID NO: 2530

SEQ ID NO: 6566 - DNA, 41 bp, Homo sapiens; identical to SEQ ID NO: 2531

SEQ ID NO: 6567 - DNA, 41 bp, Homo sapiens; identical to SEQ ID NO: 2532

SEQ ID NO: 6568 - DNA, 41 bp, Homo sapiens; identical to SEQ ID NO: 2533

SEQ ID NO: 6569 - DNA, 41 bp, Homo sapiens; identical to SEQ ID NO: 2534

SEQ ID NO: 6570 - DNA, 41 bp, Homo sapiens; identical to SEQ ID NO: 2536

SEQ ID NO: 6571 - DNA, 41 bp, Homo sapiens; identical to SEQ ID NO: 2537

SEQ ID NO: 6572 - DNA, 41 bp, Homo sapiens; identical to SEQ ID NO: 2538

SEQ ID NO: 6573 - DNA, 41 bp, Homo sapiens; identical to SEQ ID NO: 2539

SEQ ID NO: 6574 - DNA, 41 bp, Homo sapiens; identical to SEQ ID NO: 2540

SEQ ID NO: 6575 - DNA, 41 bp, Homo sapiens; identical to SEQ ID NO: 2541

SEQ ID NO: 6576 - DNA, 41 bp, Homo sapiens; identical to SEQ ID NO: 2542

SEQ ID NO: 6577 - DNA, 41 bp, Homo sapiens; identical to SEQ ID NO: 2543

SEQ ID NO: 6578 - DNA, 41 bp, Homo sapiens; identical to SEQ ID NO: 2544

SEQ ID NO: 6579 - DNA, 41 bp, Homo sapiens; identical to SEQ ID NO: 2545

SEQ ID NO: 6580 - DNA, 41 bp, Homo sapiens; identical to SEQ ID NO: 2546

SEQ ID NO: 6581 - DNA, 41 bp, Homo sapiens; identical to SEQ ID NO: 2547

SEQ ID NO: 6582 - DNA, 41 bp, Homo sapiens; identical to SEQ ID NO: 2548

SEQ ID NO: 6583 - DNA, 41 bp, Homo sapiens; identical to SEQ ID NO: 2549

SEQ ID NO: 6584 - DNA, 41 bp, Homo sapiens; identical to SEQ ID NO: 2550

SEQ ID NO: 6585 - DNA, 41 bp, Homo sapiens; identical to SEQ ID NO: 2553

SEQ ID NO: 6586 - DNA, 41 bp, Homo sapiens; identical to SEQ ID NO: 2554

SEQ ID NO: 6587 - DNA, 41 bp, Homo sapiens; identical to SEQ ID NO: 2555

SEQ ID NO: 6588 - DNA, 41 bp, Homo sapiens; identical to SEQ ID NO: 2556

SEQ ID NO: 6589 - DNA, 41 bp, Homo sapiens; identical to SEQ ID NO: 2557

SEQ ID NO: 6590 - DNA, 41 bp, Homo sapiens; identical to SEQ ID NO: 2559

SEQ ID NO: 6591 - DNA, 41 bp, Homo sapiens
gggtagccagggcagctcccygacccgcasctgccttttca

SEQ ID NO: 6592 - DNA, 41 bp, Homo sapiens
gggcagctcccygacccgcasctgccttttcacccctctcc

SEQ ID NO: 6593 - DNA, 41 bp, Homo sapiens
gccattctagatgcgagtccygactttggggygcttgcatt

SEQ ID NO: 6594 - DNA, 41 bp, Homo sapiens; identical to SEQ ID NO: 2564

SEQ ID NO: 6595 - DNA, 41 bp, Homo sapiens; identical to SEQ ID NO: 2565

SEQ ID NO: 6596 - DNA, 41 bp, Homo sapiens; identical to SEQ ID NO: 2566

SEQ ID NO: 6597 - DNA, 41 bp, Homo sapiens; identical to SEQ ID NO: 2567

SEQ ID NO: 6598 - DNA, 41 bp, Homo sapiens; identical to SEQ ID NO: 2568

SEQ ID NO: 6599 - DNA, 41 bp, Homo sapiens; identical to SEQ ID NO: 2569

SEQ ID NO: 6600 - DNA, 41 bp, Homo sapiens; identical to SEQ ID NO: 2570

SEQ ID NO: 6601 - DNA, 41 bp, Homo sapiens; identical to SEQ ID NO: 2571

SEQ ID NO: 6602 - DNA, 41 bp, Homo sapiens; identical to SEQ ID NO: 2572

SEQ ID NO: 6603 - DNA, 41 bp, Homo sapiens; identical to SEQ ID NO: 2573

SEQ ID NO: 6604 - DNA, 41 bp, Homo sapiens; identical to SEQ ID NO: 2574

SEQ ID NO: 6605 - DNA, 41 bp, Homo sapiens; identical to SEQ ID NO: 2575

SEQ ID NO: 6606 - DNA, 41 bp, Homo sapiens
atttcatgtctgcatggtacragacaccccttcacrgcata

SEQ ID NO: 6607 - DNA, 41 bp, Homo sapiens; identical to SEQ ID NO: 2584

SEQ ID NO: 6608 - DNA, 41 bp, Homo sapiens; identical to SEQ ID NO: 2585

SEQ ID NO: 6609 - DNA, 41 bp, Homo sapiens; identical to SEQ ID NO: 2586
  misc_feature (21)..(21): a is present or absent.

SEQ ID NO: 6610 - DNA, 42 bp, Homo sapiens
  misc_feature (21)..(22): at is present or absent.
gctcatgctcacagccactcatgtatggagcaaytgcctttt

SEQ ID NO: 6611 - DNA, 41 bp, Homo sapiens; identical to SEQ ID NO: 429

SEQ ID NO: 6612 - DNA, 41 bp, Homo sapiens; identical to SEQ ID NO: 430

SEQ ID NO: 6613 - DNA, 41 bp, Homo sapiens; identical to SEQ ID NO: 431

SEQ ID NO: 6614 - DNA, 41 bp, Homo sapiens; identical to SEQ ID NO: 432

SEQ ID NO: 6615 - DNA, 41 bp, Homo sapiens; identical to SEQ ID NO: 433

SEQ ID NO: 6616 - DNA, 41 bp, Homo sapiens; identical to SEQ ID NO: 434

SEQ ID NO: 6617 - DNA, 41 bp, Homo sapiens; identical to SEQ ID NO: 435

SEQ ID NO: 6618 - DNA, 41 bp, Homo sapiens; identical to SEQ ID NO: 436

SEQ ID NO: 6619 - DNA, 41 bp, Homo sapiens; identical to SEQ ID NO: 437

SEQ ID NO: 6620 - DNA, 41 bp, Homo sapiens; identical to SEQ ID NO: 438

SEQ ID NO: 6621 - DNA, 41 bp, Homo sapiens; identical to SEQ ID NO: 439

SEQ ID NO: 6622 - DNA, 41 bp, Homo sapiens; identical to SEQ ID NO: 440

SEQ ID NO: 6623 - DNA, 41 bp, Homo sapiens; identical to SEQ ID NO: 441

SEQ ID NO: 6624 - DNA, 41 bp, Homo sapiens; identical to SEQ ID NO: 442

SEQ ID NO: 6625 - DNA, 41 bp, Homo sapiens; identical to SEQ ID NO: 443

SEQ ID NO: 6626 - DNA, 41 bp, Homo sapiens; identical to SEQ ID NO: 444

SEQ ID NO: 6627 - DNA, 41 bp, Homo sapiens; identical to SEQ ID NO: 445

SEQ ID NO: 6628 - DNA, 41 bp, Homo sapiens; identical to SEQ ID NO: 446

SEQ ID NO: 6629 - DNA, 41 bp, Homo sapiens; identical to SEQ ID NO: 447

SEQ ID NO: 6630 - DNA, 41 bp, Homo sapiens; identical to SEQ ID NO: 448

SEQ ID NO: 6631 - DNA, 41 bp, Homo sapiens; identical to SEQ ID NO: 449

SEQ ID NO: 6632 - DNA, 41 bp, Homo sapiens; identical to SEQ ID NO: 450

SEQ ID NO: 6633 - DNA, 41 bp, Homo sapiens; identical to SEQ ID NO: 451

SEQ ID NO: 6634 - DNA, 41 bp, Homo sapiens; identical to SEQ ID NO: 452

SEQ ID NO: 6635 - DNA, 41 bp, Homo sapiens; identical to SEQ ID NO: 453

SEQ ID NO: 6636 - DNA, 41 bp, Homo sapiens; identical to SEQ ID NO: 454

SEQ ID NO: 6637 - DNA, 41 bp, Homo sapiens; identical to SEQ ID NO: 455

SEQ ID NO: 6638 - DNA, 41 bp, Homo sapiens; identical to SEQ ID NO: 456

SEQ ID NO: 6639 - DNA, 41 bp, Homo sapiens; identical to SEQ ID NO: 457

SEQ ID NO: 6640 - DNA, 41 bp, Homo sapiens; identical to SEQ ID NO: 458

SEQ ID NO: 6641 - DNA, 41 bp, Homo sapiens; identical to SEQ ID NO: 459

SEQ ID NO: 6642 - DNA, 41 bp, Homo sapiens; identical to SEQ ID NO: 460

SEQ ID NO: 6643 - DNA, 41 bp, Homo sapiens; identical to SEQ ID NO: 461

SEQ ID NO: 6644 - DNA, 41 bp, Homo sapiens; identical to SEQ ID NO: 462

SEQ ID NO: 6645 - DNA, 41 bp, Homo sapiens; identical to SEQ ID NO: 463

SEQ ID NO: 6646 - DNA, 41 bp, Homo sapiens; identical to SEQ ID NO: 464

SEQ ID NO: 6647 - DNA, 41 bp, Homo sapiens; identical to SEQ ID NO: 465

SEQ ID NO: 6648 - DNA, 41 bp, Homo sapiens; identical to SEQ ID NO: 466

SEQ ID NO: 6649 - DNA, 41 bp, Homo sapiens; identical to SEQ ID NO: 467

SEQ ID NO: 6650 - DNA, 41 bp, Homo sapiens; identical to SEQ ID NO: 468

SEQ ID NO: 6651 - DNA, 41 bp, Homo sapiens; identical to SEQ ID NO: 469

SEQ ID NO: 6652 - DNA, 41 bp, Homo sapiens; identical to SEQ ID NO: 470

SEQ ID NO: 6653 - DNA, 41 bp, Homo sapiens; identical to SEQ ID NO: 471

SEQ ID NO: 6654 - DNA, 41 bp, Homo sapiens; identical to SEQ ID NO: 472

SEQ ID NO: 6655 - DNA, 41 bp, Homo sapiens; identical to SEQ ID NO: 473

SEQ ID NO: 6656 - DNA, 41 bp, Homo sapiens; identical to SEQ ID NO: 474

SEQ ID NO: 6657 - DNA, 41 bp, Homo sapiens; identical to SEQ ID NO: 475

SEQ ID NO: 6658 - DNA, 41 bp, Homo sapiens; identical to SEQ ID NO: 476

SEQ ID NO: 6659 - DNA, 41 bp, Homo sapiens; identical to SEQ ID NO: 477

SEQ ID NO: 6660 - DNA, 41 bp, Homo sapiens; identical to SEQ ID NO: 478

SEQ ID NO: 6661 - DNA, 41 bp, Homo sapiens; identical to SEQ ID NO: 479

SEQ ID NO: 6662 - DNA, 41 bp, Homo sapiens
tccagcagtgcggcttcctgkyaacaaggtaggccctggtg

SEQ ID NO: 6663 - DNA, 41 bp, Homo sapiens
ccagcagtgcggcttcctgkyaacaaggtaggccctggtgc

SEQ ID NO: 6664 - DNA, 41 bp, Homo sapiens; identical to SEQ ID NO: 482

SEQ ID NO: 6665 - DNA, 41 bp, Homo sapiens; identical to SEQ ID NO: 483

SEQ ID NO: 6666 - DNA, 41 bp, Homo sapiens; identical to SEQ ID NO: 484

SEQ ID NO: 6667 - DNA, 41 bp, Homo sapiens; identical to SEQ ID NO: 485

SEQ ID NO: 6668 - DNA, 41 bp, Homo sapiens; identical to SEQ ID NO: 486

SEQ ID NO: 6669 - DNA, 41 bp, Homo sapiens; identical to SEQ ID NO: 487

SEQ ID NO: 6670 - DNA, 41 bp, Homo sapiens; identical to SEQ ID NO: 488

SEQ ID NO: 6671 - DNA, 41 bp, Homo sapiens; identical to SEQ ID NO: 489

SEQ ID NO: 6672 - DNA, 41 bp, Homo sapiens; identical to SEQ ID NO: 490

SEQ ID NO: 6673 - DNA, 41 bp, Homo sapiens; identical to SEQ ID NO: 491

SEQ ID NO: 6674 - DNA, 41 bp, Homo sapiens; identical to SEQ ID NO: 492

SEQ ID NO: 6675 - DNA, 41 bp, Homo sapiens; identical to SEQ ID NO: 493

SEQ ID NO: 6676 - DNA, 41 bp, Homo sapiens; identical to SEQ ID NO: 494

SEQ ID NO: 6677 - DNA, 41 bp, Homo sapiens; identical to SEQ ID NO: 495

SEQ ID NO: 6678 - DNA, 41 bp, Homo sapiens; identical to SEQ ID NO: 496

SEQ ID NO: 6679 - DNA, 41 bp, Homo sapiens; identical to SEQ ID NO: 497

SEQ ID NO: 6680 - DNA, 41 bp, Homo sapiens; identical to SEQ ID NO: 498

SEQ ID NO: 6681 - DNA, 41 bp, Homo sapiens; identical to SEQ ID NO: 499

SEQ ID NO: 6682 - DNA, 41 bp, Homo sapiens; identical to SEQ ID NO: 500

SEQ ID NO: 6683 - DNA, 41 bp, Homo sapiens; identical to SEQ ID NO: 501

SEQ ID NO: 6684 - DNA, 41 bp, Homo sapiens; identical to SEQ ID NO: 502

SEQ ID NO: 6685 - DNA, 41 bp, Homo sapiens; identical to SEQ ID NO: 503

SEQ ID NO: 6686 - DNA, 41 bp, Homo sapiens; identical to SEQ ID NO: 504

SEQ ID NO: 6687 - DNA, 41 bp, Homo sapiens; identical to SEQ ID NO: 505

SEQ ID NO: 6688 - DNA, 41 bp, Homo sapiens; identical to SEQ ID NO: 506

SEQ ID NO: 6689 - DNA, 41 bp, Homo sapiens; identical to SEQ ID NO: 507

SEQ ID NO: 6690 - DNA, 41 bp, Homo sapiens; identical to SEQ ID NO: 508

SEQ ID NO: 6691 - DNA, 41 bp, Homo sapiens; identical to SEQ ID NO: 509

SEQ ID NO: 6692 - DNA, 41 bp, Homo sapiens; identical to SEQ ID NO: 510

SEQ ID NO: 6693 - DNA, 41 bp, Homo sapiens; identical to SEQ ID NO: 511

SEQ ID NO: 6694 - DNA, 41 bp, Homo sapiens; identical to SEQ ID NO: 222

SEQ ID NO: 6695 - DNA, 41 bp, Homo sapiens; identical to SEQ ID NO: 226

SEQ ID NO: 6696 - DNA, 41 bp, Homo sapiens; identical to SEQ ID NO: 227

SEQ ID NO: 6697 - DNA, 41 bp, Homo sapiens; identical to SEQ ID NO: 228

SEQ ID NO: 6698 - DNA, 41 bp, Homo sapiens; identical to SEQ ID NO: 229

SEQ ID NO: 6699 - DNA, 41 bp, Homo sapiens; identical to SEQ ID NO: 230

SEQ ID NO: 6700 - DNA, 41 bp, Homo sapiens; identical to SEQ ID NO: 231

SEQ ID NO: 6701 - DNA, 41 bp, Homo sapiens; identical to SEQ ID NO: 232

SEQ ID NO: 6702 - DNA, 41 bp, Homo sapiens; identical to SEQ ID NO: 233

SEQ ID NO: 6703 - DNA, 41 bp, Homo sapiens; identical to SEQ ID NO: 234

SEQ ID NO: 6704 - DNA, 41 bp, Homo sapiens; identical to SEQ ID NO: 235

SEQ ID NO: 6705 - DNA, 41 bp, Homo sapiens; identical to SEQ ID NO: 236

SEQ ID NO: 6706 - DNA, 41 bp, Homo sapiens; identical to SEQ ID NO: 237

SEQ ID NO: 6707 - DNA, 41 bp, Homo sapiens; identical to SEQ ID NO: 238

SEQ ID NO: 6708 - DNA, 41 bp, Homo sapiens; identical to SEQ ID NO: 239

SEQ ID NO: 6709 - DNA, 41 bp, Homo sapiens; identical to SEQ ID NO: 240

SEQ ID NO: 6710 - DNA, 41 bp, Homo sapiens; identical to SEQ ID NO: 241

SEQ ID NO: 6711 - DNA, 41 bp, Homo sapiens; identical to SEQ ID NO: 242

SEQ ID NO: 6712 - DNA, 41 bp, Homo sapiens; identical to SEQ ID NO: 243

SEQ ID NO: 6713 - DNA, 41 bp, Homo sapiens; identical to SEQ ID NO: 244

SEQ ID NO: 6714 - DNA, 41 bp, Homo sapiens; identical to SEQ ID NO: 245

SEQ ID NO: 6715 - DNA, 41 bp, Homo sapiens; identical to SEQ ID NO: 246

SEQ ID NO: 6716 - DNA, 41 bp, Homo sapiens; identical to SEQ ID NO: 247

SEQ ID NO: 6717 - DNA, 41 bp, Homo sapiens; identical to SEQ ID NO: 248

SEQ ID NO: 6718 - DNA, 41 bp, Homo sapiens; identical to SEQ ID NO: 249

SEQ ID NO: 6719 - DNA, 41 bp, Homo sapiens; identical to SEQ ID NO: 250

SEQ ID NO: 6720 - DNA, 41 bp, Homo sapiens; identical to SEQ ID NO: 251

SEQ ID NO: 6721 - DNA, 41 bp, Homo sapiens; identical to SEQ ID NO: 252

SEQ ID NO: 6722 - DNA, 41 bp, Homo sapiens; identical to SEQ ID NO: 223

SEQ ID NO: 6723 - DNA, 41 bp, Homo sapiens; identical to SEQ ID NO: 224

SEQ ID NO: 6724 - DNA, 41 bp, Homo sapiens; identical to SEQ ID NO: 224

SEQ ID NO: 6725 - DNA, 120 bp, Homo sapiens
  misc_feature (25)..(25): n is c or t.
  misc_feature (30)..(30): n is c or t.
  misc_feature (35)..(35): n is c or t.
  misc_feature (40)..(40): n is c or t.
  misc_feature (45)..(45): n is c or t.
  misc_feature (50)..(50): n is c or t.
  misc_feature (55)..(55): n is c or t.
  misc_feature (60)..(60): n is c or t.
  misc_feature (65)..(65): n is c or t.
  misc_feature (70)..(70): n is c or t.
  misc_feature (75)..(75): n is c or t.
  misc_feature (80)..(80): n is c or t.
  misc_feature (85)..(85): n is c or t.
  misc_feature (90)..(90): n is c or t.
  misc_feature (95)..(95): n is c or t.
  misc_feature (100)..(100): n is c or t.
tccgcgaggatacagcggcccctgncctgncctgncctgncctgncctgncctgncctgncctgncctgncctgncctgncctgncctgncctgncctgncagacaatatgttagccgtg

SEQ ID NO: 6726 - DNA, 41 bp, Homo sapiens
  misc_feature (21)..(21): t is present or absent.
ctcctcaggccccgcccctttccattactcacttgggtccc

SEQ ID NO: 6727 - DNA, 40 bp, Homo sapiens
ctcctcaggccccgccccttccattactcacttgggtccc

SEQ ID NO: 6728 - DNA, 41 bp, Homo sapiens
  misc_feature (21)..(21): c is present or absent.
tcacctgggtcccgccctacctgtcataaccctgctcaagc

SEQ ID NO: 6729 - DNA, 41 bp, Homo sapiens; identical to SEQ ID NO: 787

SEQ ID NO: 6730 - DNA, 41 bp, Homo sapiens; identical to SEQ ID NO: 788

SEQ ID NO: 6731 - DNA, 41 bp, Homo sapiens; identical to SEQ ID NO: 789

SEQ ID NO: 6732 - DNA, 41 bp, Homo sapiens
ggattgtgccatcccttgatyggcaatgaccttttactttt

SEQ ID NO: 6733 - DNA, 41 bp, Homo sapiens
ggattgtgccatcccttgatsggcaatgaccttttactttt

SEQ ID NO: 6734 - DNA, 41 bp, Homo sapiens
aacatacaaaaattagccggrtrtggtggcgggcacctgta

SEQ ID NO: 6735 - DNA, 41 bp, Homo sapiens
catacaaaaattagccggrtrtggtggcgggcacctgtaat

SEQ ID NO: 6736 - DNA, 41 bp, Homo sapiens; identical to SEQ ID NO: 794

SEQ ID NO: 6737 - DNA, 41 bp, Homo sapiens; identical to SEQ ID NO: 795

SEQ ID NO: 6738 - DNA, 41 bp, Homo sapiens; identical to SEQ ID NO: 796

SEQ ID NO: 6739 - DNA, 44 bp, Homo sapiens; identical to SEQ ID NO: 797
  misc_feature (21)..(24): acac is present or absent.

SEQ ID NO: 6740 - DNA, 40 bp, Homo sapiens; identical to SEQ ID NO: 798

SEQ ID NO: 6741 - DNA, 41 bp, Homo sapiens; identical to SEQ ID NO: 799

SEQ ID NO: 6742 - DNA, 41 bp, Homo sapiens; identical to SEQ ID NO: 800

SEQ ID NO: 6743 - DNA, 41 bp, Homo sapiens; identical to SEQ ID NO: 801

SEQ ID NO: 6744 - DNA, 41 bp, Homo sapiens; identical to SEQ ID NO: 802

SEQ ID NO: 6745 - DNA, 41 bp, Homo sapiens; identical to SEQ ID NO: 803

SEQ ID NO: 6746 - DNA, 41 bp, Homo sapiens; identical to SEQ ID NO: 804

SEQ ID NO: 6747 - DNA, 41 bp, Homo sapiens; identical to SEQ ID NO: 805

SEQ ID NO: 6748 - DNA, 56 bp, Homo sapiens; identical to SEQ ID NO: 806
  misc_feature (21)..(36): gatttgtggtatccag is present or absent.

SEQ ID NO: 6749 - DNA, 40 bp, Homo sapiens; identical to SEQ ID NO: 807

SEQ ID NO: 6750 - DNA, 42 bp, Homo sapiens; identical to SEQ ID NO: 808
  misc_feature (21)..(22): ag is present or absent.

SEQ ID NO: 6751 - DNA, 42 bp, Homo sapiens; identical to SEQ ID NO: 809
  misc_feature (21)..(22): ta is present or absent.

SEQ ID NO: 6752 - DNA, 41 bp, Homo sapiens; identical to SEQ ID NO: 810

SEQ ID NO: 6753 - DNA, 41 bp, Homo sapiens; identical to SEQ ID NO: 811

SEQ ID NO: 6754 - DNA, 41 bp, Homo sapiens; identical to SEQ ID NO: 812

SEQ ID NO: 6755 - DNA, 41 bp, Homo sapiens; identical to SEQ ID NO: 813

SEQ ID NO: 6756 - DNA, 41 bp, Homo sapiens; identical to SEQ ID NO: 814

SEQ ID NO: 6757 - DNA, 41 bp, Homo sapiens; identical to SEQ ID NO: 815
  misc_feature (21)..(21): t is present or absent.

SEQ ID NO: 6758 - DNA, 40 bp, Homo sapiens; identical to SEQ ID NO: 816

SEQ ID NO: 6759 - DNA, 68 bp, Homo sapiens
  misc_feature (45)..(46): gt is present or absent.
  misc_feature (47)..(48): gt is present or absent.
tgtggggagtgactgtagcagtgtgtgtgtgtgtgtgtgtgtgtgtgtttcggggtggtgcattcaaa

SEQ ID NO: 6760 - DNA, 41 bp, Homo sapiens; identical to SEQ ID NO: 817

SEQ ID NO: 6761 - DNA, 41 bp, Homo sapiens; identical to SEQ ID NO: 818

SEQ ID NO: 6762 - DNA, 41 bp, Homo sapiens; identical to SEQ ID NO: 819

SEQ ID NO: 6763 - DNA, 41 bp, Homo sapiens; identical to SEQ ID NO: 820

SEQ ID NO: 6764 - DNA, 41 bp, Homo sapiens; identical to SEQ ID NO: 821

SEQ ID NO: 6765 - DNA, 41 bp, Homo sapiens
ctccctgggaacccccagctmgtsaccccttcagcccggga

SEQ ID NO: 6766 - DNA, 41 bp, Homo sapiens
cctgggaacccccagctmgtsaccccttcagcccgggaccc

SEQ ID NO: 6767 - DNA, 41 bp, Homo sapiens; identical to SEQ ID NO: 824

SEQ ID NO: 6768 - DNA, 41 bp, Homo sapiens; identical to SEQ ID NO: 825

SEQ ID NO: 6769 - DNA, 41 bp, Homo sapiens; identical to SEQ ID NO: 826

SEQ ID NO: 6770 - DNA, 41 bp, Homo sapiens; identical to SEQ ID NO: 827

SEQ ID NO: 6771 - DNA, 48 bp, Homo sapiens; identical to SEQ ID NO: 828
  misc_feature (21)..(28): cagaggct is present or absent.

SEQ ID NO: 6772 - DNA, 42 bp, Homo sapiens
  misc_feature (21)..(22): ct is present or absent.
agccctgatccacccactctctgaaacttctttgctaataaa

SEQ ID NO: 6773 - DNA, 42 bp, Homo sapiens; identical to SEQ ID NO: 831
  misc_feature (21)..(22): ag is present or absent.

SEQ ID NO: 6774 - DNA, 41 bp, Homo sapiens; identical to SEQ ID NO: 832

SEQ ID NO: 6775 - DNA, 41 bp, Homo sapiens; identical to SEQ ID NO: 833

SEQ ID NO: 6776 - DNA, 41 bp, Homo sapiens; identical to SEQ ID NO: 834

SEQ ID NO: 6777 - DNA, 41 bp, Homo sapiens; identical to SEQ ID NO: 835

SEQ ID NO: 6778 - DNA, 41 bp, Homo sapiens; identical to SEQ ID NO: 836

SEQ ID NO: 6779 - DNA, 41 bp, Homo sapiens; identical to SEQ ID NO: 837

SEQ ID NO: 6780 - DNA, 41 bp, Homo sapiens; identical to SEQ ID NO: 838

SEQ ID NO: 6781 - DNA, 41 bp, Homo sapiens; identical to SEQ ID NO: 839

SEQ ID NO: 6782 - DNA, 41 bp, Homo sapiens; identical to SEQ ID NO: 840

SEQ ID NO: 6783 - DNA, 41 bp, Homo sapiens; identical to SEQ ID NO: 841

SEQ ID NO: 6784 - DNA, 41 bp, Homo sapiens; identical to SEQ ID NO: 842

SEQ ID NO: 6785 - DNA, 45 bp, Homo sapiens
  misc_feature (21)..(25): gtaaa is present or absent.
tcattgtgcatgatacttaagtaaaaaaaaactaagctgtgtaat

SEQ ID NO: 6786 - DNA, 45 bp, Homo sapiens
  misc_feature (21)..(25): aaaaa is present or absent.
tgcatgatacttaagtaaaaaaaaactaagctgtgtaattgtagg

SEQ ID NO: 6787 - DNA, 41 bp, Homo sapiens
  misc_feature (21)..(21): a is present or absent.
tcattttggaaagactctcaaccttgctgtaccaaaaatgg

SEQ ID NO: 6788 - DNA, 40 bp, Homo sapiens
tcattttggaaagactctcaccttgctgtaccaaaaatgg

SEQ ID NO: 6789 - DNA, 41 bp, Homo sapiens; identical to SEQ ID NO: 849

SEQ ID NO: 6790 - DNA, 41 bp, Homo sapiens; identical to SEQ ID NO: 850

SEQ ID NO: 6791 - DNA, 41 bp, Homo sapiens; identical to SEQ ID NO: 851

SEQ ID NO: 6792 - DNA, 41 bp, Homo sapiens; identical to SEQ ID NO: 852

SEQ ID NO: 6793 - DNA, 41 bp, Homo sapiens; identical to SEQ ID NO: 853

SEQ ID NO: 6794 - DNA, 41 bp, Homo sapiens; identical to SEQ ID NO: 854

SEQ ID NO: 6795 - DNA, 41 bp, Homo sapiens; identical to SEQ ID NO: 855

SEQ ID NO: 6796 - DNA, 41 bp, Homo sapiens; identical to SEQ ID NO: 856

SEQ ID NO: 6797 - DNA, 41 bp, Homo sapiens; identical to SEQ ID NO: 857

SEQ ID NO: 6798 - DNA, 41 bp, Homo sapiens; identical to SEQ ID NO: 858

SEQ ID NO: 6799 - DNA, 41 bp, Homo sapiens; identical to SEQ ID NO: 859

SEQ ID NO: 6800 - DNA, 41 bp, Homo sapiens; identical to SEQ ID NO: 860

SEQ ID NO: 6801 - DNA, 41 bp, Homo sapiens; identical to SEQ ID NO: 861

SEQ ID NO: 6802 - DNA, 41 bp, Homo sapiens; identical to SEQ ID NO: 862

SEQ ID NO: 6803 - DNA, 41 bp, Homo sapiens; identical to SEQ ID NO: 863

SEQ ID NO: 6804 - DNA, 41 bp, Homo sapiens; identical to SEQ ID NO: 864

SEQ ID NO: 6805 - DNA, 41 bp, Homo sapiens; identical to SEQ ID NO: 865

SEQ ID NO: 6806 - DNA, 41 bp, Homo sapiens; identical to SEQ ID NO: 866

SEQ ID NO: 6807 - DNA, 41 bp, Homo sapiens; identical to SEQ ID NO: 867

SEQ ID NO: 6808 - DNA, 41 bp, Homo sapiens; identical to SEQ ID NO: 868

SEQ ID NO: 6809 - DNA, 41 bp, Homo sapiens; identical to SEQ ID NO: 869

SEQ ID NO: 6810 - DNA, 41 bp, Homo sapiens; identical to SEQ ID NO: 870

SEQ ID NO: 6811 - DNA, 41 bp, Homo sapiens; identical to SEQ ID NO: 871

SEQ ID NO: 6812 - DNA, 41 bp, Homo sapiens; identical to SEQ ID NO: 872

SEQ ID NO: 6813 - DNA, 41 bp, Homo sapiens; identical to SEQ ID NO: 873

SEQ ID NO: 6814 - DNA, 41 bp, Homo sapiens; identical to SEQ ID NO: 874

SEQ ID NO: 6815 - DNA, 41 bp, Homo sapiens; identical to SEQ ID NO: 875

SEQ ID NO: 6816 - DNA, 41 bp, Homo sapiens; identical to SEQ ID NO: 876

SEQ ID NO: 6817 - DNA, 41 bp, Homo sapiens; identical to SEQ ID NO: 877

SEQ ID NO: 6818 - DNA, 41 bp, Homo sapiens; identical to SEQ ID NO: 878

SEQ ID NO: 6819 - DNA, 41 bp, Homo sapiens; identical to SEQ ID NO: 879

SEQ ID NO: 6820 - DNA, 41 bp, Homo sapiens; identical to SEQ ID NO: 880

SEQ ID NO: 6821 - DNA, 41 bp, Homo sapiens; identical to SEQ ID NO: 881

SEQ ID NO: 6822 - DNA, 41 bp, Homo sapiens; identical to SEQ ID NO: 882

SEQ ID NO: 6823 - DNA, 41 bp, Homo sapiens; identical to SEQ ID NO: 883

SEQ ID NO: 6824 - DNA, 41 bp, Homo sapiens; identical to SEQ ID NO: 884

SEQ ID NO: 6825 - DNA, 41 bp, Homo sapiens; identical to SEQ ID NO: 885

SEQ ID NO: 6826 - DNA, 41 bp, Homo sapiens; identical to SEQ ID NO: 886

SEQ ID NO: 6827 - DNA, 41 bp, Homo sapiens; identical to SEQ ID NO: 887
  misc_feature (21)..(21): t is present or absent.

SEQ ID NO: 6828 - DNA, 42 bp, Homo sapiens; identical to SEQ ID NO: 888
  misc_feature (21)..(22): tc is present or absent.

SEQ ID NO: 6829 - DNA, 40 bp, Homo sapiens; identical to SEQ ID NO: 889

SEQ ID NO: 6830 - DNA, 41 bp, Homo sapiens
  misc_feature (21)..(21): t is present or absent.
tggtttctsttctccacttttcccctcgttcttgtccccyc

SEQ ID NO: 6831 - DNA, 41 bp, Homo sapiens
attcaactttttatcccccctaatgattaacatagtgtatt

SEQ ID NO: 6832 - DNA, 60 bp, Homo sapiens
  misc_feature (21)..(40): gaagaaactgttgacagttt is present or absent.
taacttcctcctaacgtcctgaagaaactgttgacagtttcttccttctttctttaacct

SEQ ID NO: 6833 - DNA, 43 bp, Homo sapiens
  misc_feature (21)..(23): cct is present or absent.
gaaactgttgacagtttcttccttctttctttaacctactcca

SEQ ID NO: 6834 - DNA, 44 bp, Homo sapiens
  misc_feature (21)..(24): tttc is present or absent.
tgttgacagtttcttccttctttctttaacctactccagtcagg

SEQ ID NO: 6835 - DNA, 54 bp, Homo sapiens
  misc_feature (21)..(34): ttcttttaaa attg is present or absent.
ccatttctcccctaaaattgttcttttaaaattgctcttttcaaggttatccac

SEQ ID NO: 6836 - DNA, 40 bp, Homo sapiens
ccatttctcccctaaaattgctcttttcaaggttatccac

SEQ ID NO: 6837 - DNA, 51 bp, Homo sapiens
  misc_feature (21)..(31): ttcaggccttt is present or absent.
gccacatccaatggtcagttttcaggcctttctcagacctcatgtcatgtg

SEQ ID NO: 6838 - DNA, 40 bp, Homo sapiens
gccacatccaatggtcagttctcagacctcatgtcatgtg

SEQ ID NO: 6839 - DNA, 46 bp, Homo sapiens
  misc_feature (21)..(26): ggcctg is present or absent.
gacctcatgtcatgtgcctgggcctgtgcatttgcttctagggagg

SEQ ID NO: 6840 - DNA, 40 bp, Homo sapiens
gacctcatgtcatgtgcctgtgcatttgcttctagggagg

SEQ ID NO: 6841 - DNA, 41 bp, Homo sapiens
  misc_feature (21)..(21): a is present or absent.
gatgcaaaataaaataaaaaatactataccaataccacatc

SEQ ID NO: 6842 - DNA, 40 bp, Homo sapiens
gatgcaaaataaaataaaaatactataccaataccacatc

SEQ ID NO: 6843 - DNA, 41 bp, Homo sapiens; identical to SEQ ID NO: 2619

SEQ ID NO: 6844 - DNA, 41 bp, Homo sapiens; identical to SEQ ID NO: 2620

SEQ ID NO: 6845 - DNA, 41 bp, Homo sapiens; identical to SEQ ID NO: 2621

SEQ ID NO: 6846 - DNA, 41 bp, Homo sapiens; identical to SEQ ID NO: 2622

SEQ ID NO: 6847 - DNA, 41 bp, Homo sapiens; identical to SEQ ID NO: 2623

SEQ ID NO: 6848 - DNA, 41 bp, Homo sapiens; identical to SEQ ID NO: 2624

SEQ ID NO: 6849 - DNA, 41 bp, Homo sapiens; identical to SEQ ID NO: 2625

SEQ ID NO: 6850 - DNA, 41 bp, Homo sapiens
cagctgattatactactgaamcgggataaatgyagcttgat

SEQ ID NO: 6851 - DNA, 41 bp, Homo sapiens
ctactgaamcgggataaatgyagcttgatgattttcagctg

SEQ ID NO: 6852 - DNA, 41 bp, Homo sapiens; identical to SEQ ID NO: 2628

SEQ ID NO: 6853 - DNA, 41 bp, Homo sapiens; identical to SEQ ID NO: 2629

SEQ ID NO: 6854 - DNA, 41 bp, Homo sapiens; identical to SEQ ID NO: 2630

SEQ ID NO: 6855 - DNA, 41 bp, Homo sapiens; identical to SEQ ID NO: 2631

SEQ ID NO: 6856 - DNA, 41 bp, Homo sapiens; identical to SEQ ID NO: 2632

SEQ ID NO: 6857 - DNA, 41 bp, Homo sapiens; identical to SEQ ID NO: 2633

SEQ ID NO: 6858 - DNA, 41 bp, Homo sapiens; identical to SEQ ID NO: 2634

SEQ ID NO: 6859 - DNA, 41 bp, Homo sapiens; identical to SEQ ID NO: 2636

SEQ ID NO: 6860 - DNA, 41 bp, Homo sapiens; identical to SEQ ID NO: 2637

SEQ ID NO: 6861 - DNA, 41 bp, Homo sapiens; identical to SEQ ID NO: 2639

SEQ ID NO: 6862 - DNA, 41 bp, Homo sapiens; identical to SEQ ID NO: 2640

SEQ ID NO: 6863 - DNA, 41 bp, Homo sapiens
cacattgttatgtaaccaagyctkgaattgcagtgtgaaga

SEQ ID NO: 6864 - DNA, 41 bp, Homo sapiens
attgttatgtaaccaagyctkgaattgcagtgtgaagaact

SEQ ID NO: 6865 - DNA, 41 bp, Homo sapiens; identical to SEQ ID NO: 2646

SEQ ID NO: 6866 - DNA, 41 bp, Homo sapiens; identical to SEQ ID NO: 2647

SEQ ID NO: 6867 - DNA, 41 bp, Homo sapiens; identical to SEQ ID NO: 2648

SEQ ID NO: 6868 - DNA, 41 bp, Homo sapiens; identical to SEQ ID NO: 2649

SEQ ID NO: 6869 - DNA, 41 bp, Homo sapiens; identical to SEQ ID NO: 2650

SEQ ID NO: 6870 - DNA, 51 bp, Homo sapiens; identical to SEQ ID NO: 2651
  misc_feature (30)..(31): c is present or absent.

SEQ ID NO: 6871 - DNA, 61 bp, Homo sapiens; identical to SEQ ID NO: 2652
  misc_feature (36)..(41): a is present or absent.

SEQ ID NO: 6872 - DNA, 56 bp, Homo sapiens; identical to SEQ ID NO: 2653
  misc_feature (21)..(36): ggggtggcggggtggg is present or absent.

SEQ ID NO: 6873 - DNA, 41 bp, Homo sapiens; identical to SEQ ID NO: 2654
  misc_feature (21)..(21): t is present or absent.

SEQ ID NO: 6874 - DNA, 41 bp, Homo sapiens; identical to SEQ ID NO: 2655
  misc_feature (21)..(21): a is present or absent.

SEQ ID NO: 6875 - DNA, 40 bp, Homo sapiens; identical to SEQ ID NO: 2656

SEQ ID NO: 6876 - DNA, 41 bp, Homo sapiens; identical to SEQ ID NO: 2657
  misc_feature (21)..(21): a is present or absent.

SEQ ID NO: 6877 - DNA, 52 bp, Homo sapiens; identical to SEQ ID NO: 2658
  misc_feature (31)..(32): t is present or absent.

SEQ ID NO: 6878 - DNA, 42 bp, Homo sapiens; identical to SEQ ID NO: 2659
  misc_feature (21)..(22): tt is present or absent.

SEQ ID NO: 6879 - DNA, 40 bp, Homo sapiens; identical to SEQ ID NO: 2660

SEQ ID NO: 6880 - DNA, 61 bp, Homo sapiens
  misc_feature (21)..(41): tccctccttgaagctgatcgt is present or absent.
ccctmcttgaagctgatcgttccctccttgaagctgatcgtgtccaagatagttgctagga

SEQ ID NO: 6881 - DNA, 76 bp, Homo sapiens; identical to SEQ ID NO: 2662
  misc_feature (45)..(46): ca is present or absent.
  misc_feature (47)..(48): ca is present or absent.
  misc_feature (49)..(50): ca is present or absent.
  misc_feature (51)..(52): ca is present or absent.
  misc_feature (53)..(54): ca is present or absent.
  misc_feature (55)..(56): ca is present or absent.

SEQ ID NO: 6882 - DNA, 41 bp, Homo sapiens; identical to SEQ ID NO: 847

SEQ ID NO: 6883 - DNA, 41 bp, Homo sapiens; identical to SEQ ID NO: 848

SEQ ID NO: 6884 - DNA, 41 bp, Homo sapiens
ttaaaagttgacttttttctrccrggcacggtggctcacgc

SEQ ID NO: 6885 - DNA, 41 bp, Homo sapiens
aaagttgacttttttctrccrggcacggtggctcacgcctg

SEQ ID NO: 6886 - DNA, 41 bp, Homo sapiens; identical to SEQ ID NO: 991

SEQ ID NO: 6887 - DNA, 41 bp, Homo sapiens; identical to SEQ ID NO: 992

SEQ ID NO: 6888 - DNA, 41 bp, Homo sapiens; identical to SEQ ID NO: 993

SEQ ID NO: 6889 - DNA, 41 bp, Homo sapiens; identical to SEQ ID NO: 994

SEQ ID NO: 6890 - DNA, 41 bp, Homo sapiens; identical to SEQ ID NO: 995

SEQ ID NO: 6891 - DNA, 41 bp, Homo sapiens; identical to SEQ ID NO: 996

SEQ ID NO: 6892 - DNA, 41 bp, Homo sapiens; identical to SEQ ID NO: 997

SEQ ID NO: 6893 - DNA, 41 bp, Homo sapiens; identical to SEQ ID NO: 998

SEQ ID NO: 6894 - DNA, 43 bp, Homo sapiens; identical to SEQ ID NO: 999
  misc_feature (21)..(23): gtt is present or absent.

SEQ ID NO: 6895 - DNA, 41 bp, Homo sapiens; identical to SEQ ID NO: 1000

SEQ ID NO: 6896 - DNA, 41 bp, Homo sapiens; identical to SEQ ID NO: 1001

SEQ ID NO: 6897 - DNA, 42 bp, Homo sapiens
  misc_feature (21)..(22): ga is present or absent.
agttctgaggctgagagagagaggccacgccgccggccagtg

SEQ ID NO: 6898 - DNA, 40 bp, Homo sapiens
agttctgaggctgagagagaggccacgccgccggccagtg

SEQ ID NO: 6899 - DNA, 41 bp, Homo sapiens; identical to SEQ ID NO: 891

SEQ ID NO: 6900 - DNA, 41 bp, Homo sapiens; identical to SEQ ID NO: 892

SEQ ID NO: 6901 - DNA, 41 bp, Homo sapiens; identical to SEQ ID NO: 893

SEQ ID NO: 6902 - DNA, 41 bp, Homo sapiens; identical to SEQ ID NO: 894

SEQ ID NO: 6903 - DNA, 41 bp, Homo sapiens; identical to SEQ ID NO: 895

SEQ ID NO: 6904 - DNA, 41 bp, Homo sapiens; identical to SEQ ID NO: 896

SEQ ID NO: 6905 - DNA, 41 bp, Homo sapiens; identical to SEQ ID NO: 897

SEQ ID NO: 6906 - DNA, 41 bp, Homo sapiens; identical to SEQ ID NO: 898

SEQ ID NO: 6907 - DNA, 41 bp, Homo sapiens; identical to SEQ ID NO: 899

SEQ ID NO: 6908 - DNA, 41 bp, Homo sapiens; identical to SEQ ID NO: 900

SEQ ID NO: 6909 - DNA, 41 bp, Homo sapiens; identical to SEQ ID NO: 901

SEQ ID NO: 6910 - DNA, 41 bp, Homo sapiens; identical to SEQ ID NO: 902

SEQ ID NO: 6911 - DNA, 41 bp, Homo sapiens; identical to SEQ ID NO: 903

SEQ ID NO: 6912 - DNA, 41 bp, Homo sapiens; identical to SEQ ID NO: 904

SEQ ID NO: 6913 - DNA, 41 bp, Homo sapiens; identical to SEQ ID NO: 905

SEQ ID NO: 6914 - DNA, 41 bp, Homo sapiens; identical to SEQ ID NO: 906

SEQ ID NO: 6915 - DNA, 41 bp, Homo sapiens; identical to SEQ ID NO: 907

SEQ ID NO: 6916 - DNA, 41 bp, Homo sapiens; identical to SEQ ID NO: 908

SEQ ID NO: 6917 - DNA, 41 bp, Homo sapiens; identical to SEQ ID NO: 909

SEQ ID NO: 6918 - DNA, 41 bp, Homo sapiens; identical to SEQ ID NO: 910

SEQ ID NO: 6919 - DNA, 41 bp, Homo sapiens; identical to SEQ ID NO: 911

SEQ ID NO: 6920 - DNA, 41 bp, Homo sapiens; identical to SEQ ID NO: 912

SEQ ID NO: 6921 - DNA, 41 bp, Homo sapiens; identical to SEQ ID NO: 913
  misc_feature (21)..(21): t is present or absent.

SEQ ID NO: 6922 - DNA, 41 bp, Homo sapiens; identical to SEQ ID NO: 914

SEQ ID NO: 6923 - DNA, 41 bp, Homo sapiens; identical to SEQ ID NO: 915

SEQ ID NO: 6924 - DNA, 41 bp, Homo sapiens; identical to SEQ ID NO: 916

SEQ ID NO: 6925 - DNA, 41 bp, Homo sapiens; identical to SEQ ID NO: 917

SEQ ID NO: 6926 - DNA, 41 bp, Homo sapiens; identical to SEQ ID NO: 918

SEQ ID NO: 6927 - DNA, 41 bp, Homo sapiens; identical to SEQ ID NO: 919

SEQ ID NO: 6928 - DNA, 41 bp, Homo sapiens; identical to SEQ ID NO: 920

SEQ ID NO: 6929 - DNA, 41 bp, Homo sapiens; identical to SEQ ID NO: 921

SEQ ID NO: 6930 - DNA, 41 bp, Homo sapiens; identical to SEQ ID NO: 922

SEQ ID NO: 6931 - DNA, 41 bp, Homo sapiens; identical to SEQ ID NO: 923

SEQ ID NO: 6932 - DNA, 41 bp, Homo sapiens; identical to SEQ ID NO: 924

SEQ ID NO: 6933 - DNA, 41 bp, Homo sapiens; identical to SEQ ID NO: 925

SEQ ID NO: 6934 - DNA, 41 bp, Homo sapiens; identical to SEQ ID NO: 926

SEQ ID NO: 6935 - DNA, 41 bp, Homo sapiens; identical to SEQ ID NO: 927

SEQ ID NO: 6936 - DNA, 41 bp, Homo sapiens; identical to SEQ ID NO: 928

SEQ ID NO: 6937 - DNA, 41 bp, Homo sapiens; identical to SEQ ID NO: 929

SEQ ID NO: 6938 - DNA, 41 bp, Homo sapiens; identical to SEQ ID NO: 930

SEQ ID NO: 6939 - DNA, 41 bp, Homo sapiens; identical to SEQ ID NO: 931

SEQ ID NO: 6940 - DNA, 41 bp, Homo sapiens; identical to SEQ ID NO: 932
  misc_feature (21)..(21): t is present or absent.

SEQ ID NO: 6941 - DNA, 41 bp, Homo sapiens; identical to SEQ ID NO: 933
  misc_feature (21)..(21): t is present or absent.

SEQ ID NO: 6942 - DNA, 41 bp, Homo sapiens
  misc_feature (21)..(21): t is present or absent.
ctcatcatttaggtgctggttagttgggtttgtggcaaatc

SEQ ID NO: 6943 - DNA, 40 bp, Homo sapiens
ctcatcatttaggtgctggtagttgggtttgtggcaaatc

SEQ ID NO: 6944 - DNA, 41 bp, Homo sapiens; identical to SEQ ID NO: 934

SEQ ID NO: 6945 - DNA, 41 bp, Homo sapiens; identical to SEQ ID NO: 935

SEQ ID NO: 6946 - DNA, 41 bp, Homo sapiens; identical to SEQ ID NO: 936

SEQ ID NO: 6947 - DNA, 41 bp, Homo sapiens; identical to SEQ ID NO: 937

SEQ ID NO: 6948 - DNA, 41 bp, Homo sapiens; identical to SEQ ID NO: 938

SEQ ID NO: 6949 - DNA, 41 bp, Homo sapiens; identical to SEQ ID NO: 939

SEQ ID NO: 6950 - DNA, 41 bp, Homo sapiens; identical to SEQ ID NO: 940

SEQ ID NO: 6951 - DNA, 41 bp, Homo sapiens; identical to SEQ ID NO: 941

SEQ ID NO: 6952 - DNA, 41 bp, Homo sapiens; identical to SEQ ID NO: 942

SEQ ID NO: 6953 - DNA, 41 bp, Homo sapiens; identical to SEQ ID NO: 943

SEQ ID NO: 6954 - DNA, 41 bp, Homo sapiens; identical to SEQ ID NO: 944

SEQ ID NO: 6955 - DNA, 41 bp, Homo sapiens; identical to SEQ ID NO: 945

SEQ ID NO: 6956 - DNA, 41 bp, Homo sapiens; identical to SEQ ID NO: 946

SEQ ID NO: 6957 - DNA, 41 bp, Homo sapiens; identical to SEQ ID NO: 947

SEQ ID NO: 6958 - DNA, 41 bp, Homo sapiens; identical to SEQ ID NO: 948

SEQ ID NO: 6959 - DNA, 41 bp, Homo sapiens; identical to SEQ ID NO: 949

SEQ ID NO: 6960 - DNA, 41 bp, Homo sapiens; identical to SEQ ID NO: 950

SEQ ID NO: 6961 - DNA, 41 bp, Homo sapiens; identical to SEQ ID NO: 951

SEQ ID NO: 6962 - DNA, 41 bp, Homo sapiens; identical to SEQ ID NO: 952

SEQ ID NO: 6963 - DNA, 41 bp, Homo sapiens; identical to SEQ ID NO: 953

SEQ ID NO: 6964 - DNA, 41 bp, Homo sapiens; identical to SEQ ID NO: 954

SEQ ID NO: 6965 - DNA, 42 bp, Homo sapiens; identical to SEQ ID NO: 955
  misc_feature (21)..(22): at is present or absent.

SEQ ID NO: 6966 - DNA, 41 bp, Homo sapiens
  misc_feature (21)..(21): a is present or absent.
caagtgactaccctgaaaaaagaagagatgaaacaaatcac

SEQ ID NO: 6967 - DNA, 41 bp, Homo sapiens; identical to SEQ ID NO: 957
  misc_feature (21)..(21): c is present or absent.

SEQ ID NO: 6968 - DNA, 41 bp, Homo sapiens; identical to SEQ ID NO: 958

SEQ ID NO: 6969 - DNA, 41 bp, Homo sapiens; identical to SEQ ID NO: 959

SEQ ID NO: 6970 - DNA, 41 bp, Homo sapiens; identical to SEQ ID NO: 960

SEQ ID NO: 6971 - DNA, 41 bp, Homo sapiens; identical to SEQ ID NO: 961

SEQ ID NO: 6972 - DNA, 41 bp, Homo sapiens; identical to SEQ ID NO: 962

SEQ ID NO: 6973 - DNA, 41 bp, Homo sapiens; identical to SEQ ID NO: 963

SEQ ID NO: 6974 - DNA, 41 bp, Homo sapiens; identical to SEQ ID NO: 964

SEQ ID NO: 6975 - DNA, 41 bp, Homo sapiens; identical to SEQ ID NO: 965

SEQ ID NO: 6976 - DNA, 41 bp, Homo sapiens; identical to SEQ ID NO: 966

SEQ ID NO: 6977 - DNA, 41 bp, Homo sapiens; identical to SEQ ID NO: 967

SEQ ID NO: 6978 - DNA, 41 bp, Homo sapiens; identical to SEQ ID NO: 968

SEQ ID NO: 6979 - DNA, 41 bp, Homo sapiens; identical to SEQ ID NO: 969

SEQ ID NO: 6980 - DNA, 41 bp, Homo sapiens; identical to SEQ ID NO: 970

SEQ ID NO: 6981 - DNA, 41 bp, Homo sapiens; identical to SEQ ID NO: 971

SEQ ID NO: 6982 - DNA, 41 bp, Homo sapiens; identical to SEQ ID NO: 972

SEQ ID NO: 6983 - DNA, 41 bp, Homo sapiens; identical to SEQ ID NO: 973

SEQ ID NO: 6984 - DNA, 41 bp, Homo sapiens; identical to SEQ ID NO: 974

SEQ ID NO: 6985 - DNA, 41 bp, Homo sapiens; identical to SEQ ID NO: 975

SEQ ID NO: 6986 - DNA, 41 bp, Homo sapiens; identical to SEQ ID NO: 976

SEQ ID NO: 6987 - DNA, 41 bp, Homo sapiens; identical to SEQ ID NO: 977

SEQ ID NO: 6988 - DNA, 41 bp, Homo sapiens; identical to SEQ ID NO: 978

SEQ ID NO: 6989 - DNA, 41 bp, Homo sapiens; identical to SEQ ID NO: 979

SEQ ID NO: 6990 - DNA, 41 bp, Homo sapiens; identical to SEQ ID NO: 980

SEQ ID NO: 6991 - DNA, 41 bp, Homo sapiens; identical to SEQ ID NO: 981

SEQ ID NO: 6992 - DNA, 41 bp, Homo sapiens; identical to SEQ ID NO: 982

SEQ ID NO: 6993 - DNA, 41 bp, Homo sapiens; identical to SEQ ID NO: 983

SEQ ID NO: 6994 - DNA, 41 bp, Homo sapiens; identical to SEQ ID NO: 984

SEQ ID NO: 6995 - DNA, 41 bp, Homo sapiens; identical to SEQ ID NO: 985

SEQ ID NO: 6996 - DNA, 41 bp, Homo sapiens; identical to SEQ ID NO: 986

SEQ ID NO: 6997 - DNA, 41 bp, Homo sapiens; identical to SEQ ID NO: 987
  misc_feature (21)..(21): c is present or absent.

SEQ ID NO: 6998 - DNA, 40 bp, Homo sapiens; identical to SEQ ID NO: 988

SEQ ID NO: 6999 - DNA, 41 bp, Homo sapiens; identical to SEQ ID NO: 2588

SEQ ID NO: 7000 - DNA, 41 bp, Homo sapiens; identical to SEQ ID NO: 2589

SEQ ID NO: 7001 - DNA, 41 bp, Homo sapiens; identical to SEQ ID NO: 2590

SEQ ID NO: 7002 - DNA, 41 bp, Homo sapiens; identical to SEQ ID NO: 2591

SEQ ID NO: 7003 - DNA, 41 bp, Homo sapiens; identical to SEQ ID NO: 2592

SEQ ID NO: 7004 - DNA, 41 bp, Homo sapiens; identical to SEQ ID NO: 2593

SEQ ID NO: 7005 - DNA, 41 bp, Homo sapiens; identical to SEQ ID NO: 2594
  misc_feature (21)..(21): t is present or absent.

SEQ ID NO: 7006 - DNA, 43 bp, Homo sapiens; identical to SEQ ID NO: 2595
  misc_feature (21)..(23): ttc is present or absent.

SEQ ID NO: 7007 - DNA, 41 bp, Homo sapiens; identical to SEQ ID NO: 2596

SEQ ID NO: 7008 - DNA, 41 bp, Homo sapiens; identical to SEQ ID NO: 2597

SEQ ID NO: 7009 - DNA, 41 bp, Homo sapiens; identical to SEQ ID NO: 2598

SEQ ID NO: 7010 - DNA, 41 bp, Homo sapiens; identical to SEQ ID NO: 2599

SEQ ID NO: 7011 - DNA, 41 bp, Homo sapiens; identical to SEQ ID NO: 2600

SEQ ID NO: 7012 - DNA, 41 bp, Homo sapiens; identical to SEQ ID NO: 2601

SEQ ID NO: 7013 - DNA, 41 bp, Homo sapiens; identical to SEQ ID NO: 2602

SEQ ID NO: 7014 - DNA, 41 bp, Homo sapiens; identical to SEQ ID NO: 2603

SEQ ID NO: 7015 - DNA, 41 bp, Homo sapiens; identical to SEQ ID NO: 2604

SEQ ID NO: 7016 - DNA, 41 bp, Homo sapiens; identical to SEQ ID NO: 2605

SEQ ID NO: 7017 - DNA, 43 bp, Homo sapiens; identical to SEQ ID NO: 2606
  misc_feature (21)..(23): ctt is present or absent.

SEQ ID NO: 7018 - DNA, 40 bp, Homo sapiens; identical to SEQ ID NO: 2607

SEQ ID NO: 7019 - DNA, 41 bp, Homo sapiens; identical to SEQ ID NO: 2609

SEQ ID NO: 7020 - DNA, 41 bp, Homo sapiens; identical to SEQ ID NO: 2610

SEQ ID NO: 7021 - DNA, 41 bp, Homo sapiens; identical to SEQ ID NO: 2611

SEQ ID NO: 7022 - DNA, 41 bp, Homo sapiens; identical to SEQ ID NO: 2612

SEQ ID NO: 7023 - DNA, 41 bp, Homo sapiens; identical to SEQ ID NO: 2613

SEQ ID NO: 7024 - DNA, 41 bp, Homo sapiens; identical to SEQ ID NO: 2614

SEQ ID NO: 7025 - DNA, 41 bp, Homo sapiens; identical to SEQ ID NO: 2615

SEQ ID NO: 7026 - DNA, 41 bp, Homo sapiens; identical to SEQ ID NO: 2616

SEQ ID NO: 7027 - DNA, 41 bp, Homo sapiens; identical to SEQ ID NO: 2617

SEQ ID NO: 7028 - DNA, 41 bp, Homo sapiens; identical to SEQ ID NO: 2618

SEQ ID NO: 7029 - DNA, 41 bp, Homo sapiens; identical to SEQ ID NO: 220

SEQ ID NO: 7030 - DNA, 41 bp, Homo sapiens; identical to SEQ ID NO: 221

SEQ ID NO: 7031 - DNA, 41 bp, Homo sapiens; identical to SEQ ID NO: 206

SEQ ID NO: 7032 - DNA, 41 bp, Homo sapiens; identical to SEQ ID NO: 207

SEQ ID NO: 7033 - DNA, 41 bp, Homo sapiens; identical to SEQ ID NO: 208

SEQ ID NO: 7034 - DNA, 41 bp, Homo sapiens; identical to SEQ ID NO: 209

SEQ ID NO: 7035 - DNA, 41 bp, Homo sapiens; identical to SEQ ID NO: 210

SEQ ID NO: 7036 - DNA, 41 bp, Homo sapiens; identical to SEQ ID NO: 211

SEQ ID NO: 7037 - DNA, 41 bp, Homo sapiens; identical to SEQ ID NO: 212

SEQ ID NO: 7038 - DNA, 41 bp, Homo sapiens; identical to SEQ ID NO: 213

SEQ ID NO: 7039 - DNA, 41 bp, Homo sapiens; identical to SEQ ID NO: 214

SEQ ID NO: 7040 - DNA, 41 bp, Homo sapiens; identical to SEQ ID NO: 215

SEQ ID NO: 7041 - DNA, 41 bp, Homo sapiens; identical to SEQ ID NO: 216

SEQ ID NO: 7042 - DNA, 41 bp, Homo sapiens; identical to SEQ ID NO: 217

SEQ ID NO: 7043 - DNA, 41 bp, Homo sapiens; identical to SEQ ID NO: 218

SEQ ID NO: 7044 - DNA, 41 bp, Homo sapiens; identical to SEQ ID NO: 219

SEQ ID NO: 7045 - DNA, 41 bp, Homo sapiens
ccgccccgactccctcccccstcgcgtgactgcgagccccc

SEQ ID NO: 7046 - DNA, 41 bp, Homo sapiens
tgactgcgagcccccgcgccrggccggggaatgggtcggct

SEQ ID NO: 7047 - DNA, 41 bp, Homo sapiens
gcgccgggccggggaatgggkcggctgggtggctgcgcggg

SEQ ID NO: 7048 - DNA, 41 bp, Homo sapiens
cgcgcctccgggccaggtggrgcggggacgggccgcctgac

SEQ ID NO: 7049 - DNA, 49 bp, Homo sapiens
  misc_feature (29)..(29): a is present or absent.
cattcattgagaattgagccaaaaaaaaaccctggcctggatttctctg

SEQ ID NO: 7050 - DNA, 41 bp, Homo sapiens
ctggcctggatttctctgacyaaagagctcaatctagctgg

SEQ ID NO: 7051 - DNA, 41 bp, Homo sapiens; identical to SEQ ID NO: 1230

SEQ ID NO: 7052 - DNA, 41 bp, Homo sapiens; identical to SEQ ID NO: 1231

SEQ ID NO: 7053 - DNA, 52 bp, Homo sapiens
  misc_feature (31)..(32): t is present or absent.
caccgcgagatttccaggtcttttttttttttgagacggagtctcactgtgt

SEQ ID NO: 7054 - DNA, 41 bp, Homo sapiens
gcctcagcctcccaagtagcygggactacaggcgcctgcca

SEQ ID NO: 7055 - DNA, 41 bp, Homo sapiens; identical to SEQ ID NO: 1232

SEQ ID NO: 7056 - DNA, 41 bp, Homo sapiens; identical to SEQ ID NO: 1233

SEQ ID NO: 7057 - DNA, 41 bp, Homo sapiens; identical to SEQ ID NO: 1234

SEQ ID NO: 7058 - DNA, 41 bp, Homo sapiens
aagagtgacatggggtataasaggggataattcatggggca

SEQ ID NO: 7059 - DNA, 65 bp, Homo sapiens
  misc_feature (43)..(45): t is present or absent.
tgccccaggctgcctgctgctttttttttttttttttttttttttcatagaaaatagaaaaacat

SEQ ID NO: 7060 - DNA, 41 bp, Homo sapiens; identical to SEQ ID NO: 1235

SEQ ID NO: 7061 - DNA, 41 bp, Homo sapiens; identical to SEQ ID NO: 1236

SEQ ID NO: 7062 - DNA, 41 bp, Homo sapiens; identical to SEQ ID NO: 1237

SEQ ID NO: 7063 - DNA, 41 bp, Homo sapiens; identical to SEQ ID NO: 1238

SEQ ID NO: 7064 - DNA, 41 bp, Homo sapiens; identical to SEQ ID NO: 1239

SEQ ID NO: 7065 - DNA, 41 bp, Homo sapiens; identical to SEQ ID NO: 1240

SEQ ID NO: 7066 - DNA, 41 bp, Homo sapiens; identical to SEQ ID NO: 1241

SEQ ID NO: 7067 - DNA, 41 bp, Homo sapiens; identical to SEQ ID NO: 1242

SEQ ID NO: 7068 - DNA, 41 bp, Homo sapiens; identical to SEQ ID NO: 1243

SEQ ID NO: 7069 - DNA, 41 bp, Homo sapiens; identical to SEQ ID NO: 1244

SEQ ID NO: 7070 - DNA, 41 bp, Homo sapiens; identical to SEQ ID NO: 1245
  misc_feature (21)..(21): t is present or absent.

SEQ ID NO: 7071 - DNA, 40 bp, Homo sapiens; identical to SEQ ID NO: 1246

SEQ ID NO: 7072 - DNA, 41 bp, Homo sapiens; identical to SEQ ID NO: 1247

SEQ ID NO: 7073 - DNA, 41 bp, Homo sapiens
  misc_feature (21)..(21): a is present or absent.
tcagcaaagaaaaaaaaaaaagccagccaagctttaaatta

SEQ ID NO: 7074 - DNA, 41 bp, Homo sapiens
  misc_feature (21)..(21): a is present or absent.
tctcataggttaaaaaaaaaagtcaccaaatagtgtgaaat

SEQ ID NO: 7075 - DNA, 41 bp, Homo sapiens
ttgaataatatatgccttgtrtaatattgaaaattgaaaag

SEQ ID NO: 7076 - DNA, 41 bp, Homo sapiens
  misc_feature (21)..(21): c is present or absent.
ttgaaattctatttataatacagaatcttgttttgaaaata

SEQ ID NO: 7077 - DNA, 52 bp, Homo sapiens
  misc_feature (31)..(32): t is present or absent.
agccagcctctttctttttcttttttttttttaaaatttattcctatttcct

SEQ ID NO: 7078 - DNA, 41 bp, Homo sapiens; identical to SEQ ID NO: 1251
  misc_feature (21)..(21): a is present or absent.

SEQ ID NO: 7079 - DNA, 51 bp, Homo sapiens
  misc_feature (30)..(31): a is present or absent.
cacaaaatgagtttgtggggaaaaaaaaaaaacacaaaggcggaatcacat

SEQ ID NO: 7080 - DNA, 41 bp, Homo sapiens; identical to SEQ ID NO: 3353

SEQ ID NO: 7081 - DNA, 41 bp, Homo sapiens; identical to SEQ ID NO: 3354

SEQ ID NO: 7082 - DNA, 41 bp, Homo sapiens; identical to SEQ ID NO: 3355
  misc_feature (21)..(21): a is present or absent.

SEQ ID NO: 7083 - DNA, 40 bp, Homo sapiens; identical to SEQ ID NO: 3356

SEQ ID NO: 7084 - DNA, 41 bp, Homo sapiens; identical to SEQ ID NO: 3357

SEQ ID NO: 7085 - DNA, 41 bp, Homo sapiens; identical to SEQ ID NO: 3358
  misc_feature (21)..(21): t is present or absent.

SEQ ID NO: 7086 - DNA, 41 bp, Homo sapiens; identical to SEQ ID NO: 3359

SEQ ID NO: 7087 - DNA, 41 bp, Homo sapiens; identical to SEQ ID NO: 3360

SEQ ID NO: 7088 - DNA, 41 bp, Homo sapiens
ggaagactcacagaacacagytgaagaaggaaagtggcgat

SEQ ID NO: 7089 - DNA, 41 bp, Homo sapiens
  misc_feature (21)..(21): a is present or absent.
tgtgggtagtggaggctccaacctgtcccattaacttctac

SEQ ID NO: 7090 - DNA, 40 bp, Homo sapiens
tgtgggtagtggaggctccacctgtcccattaacttctac

SEQ ID NO: 7091 - DNA, 41 bp, Homo sapiens
acatttttaaatgaattgatrtggtttaaattcattcattt

SEQ ID NO: 7092 - DNA, 41 bp, Homo sapiens
tatggtttaaattcattcatktttaaaccagaattttttgg

SEQ ID NO: 7093 - DNA, 41 bp, Homo sapiens
ttcatgggtcctggccccacmgtggaggtcactcaaagggc

SEQ ID NO: 7094 - DNA, 41 bp, Homo sapiens
cttatcttatatgccatactrcaccatttgctatcaacagg

SEQ ID NO: 7095 - DNA, 41 bp, Homo sapiens
tggttctaattttactcttcrtgttcttcatccttgaaaat

SEQ ID NO: 7096 - DNA, 41 bp, Homo sapiens
aatgacatgaacaaggtgtgwttgtgaagcaagggatattt

SEQ ID NO: 7097 - DNA, 41 bp, Homo sapiens
gagtgcttcgctatttgcctyaacaagaaaaagtcatttgt

SEQ ID NO: 7098 - DNA, 41 bp, Homo sapiens
agtcatttgtccacttttcaytgaacaatcttccttcatcc

SEQ ID NO: 7099 - DNA, 41 bp, Homo sapiens
aagataacacactggaagtcrcacaccaccataaaactgaa

SEQ ID NO: 7100 - DNA, 41 bp, Homo sapiens
acaattcacttcacgtggcaytgcaatagcgtcctctcgct

SEQ ID NO: 7101 - DNA, 41 bp, Homo sapiens
  misc_feature (21)..(21): a is present or absent.
tacctacttttcaaaaaaaaatcaccacatcatggcatccc

SEQ ID NO: 7102 - DNA, 41 bp, Homo sapiens
ccagatggctgggtctccccwctcccacccccgccccacat

SEQ ID NO: 7103 - DNA, 41 bp, Homo sapiens
gttctgaaaatgtgcaggaaktattccaggaagatgagaat

SEQ ID NO: 7104 - DNA, 41 bp, Homo sapiens
aaatttttattgggaaaaagyctaccccatatttacttaca

SEQ ID NO: 7105 - DNA, 41 bp, Homo sapiens
  misc_feature (21)..(21): a is present or absent.
atttaaataaaaaaaaaaaaacacgagtccacaagaatttg

SEQ ID NO: 7106 - DNA, 41 bp, Homo sapiens
tggagaaaatattcatagttycattctgccttctttgaaga

SEQ ID NO: 7107 - DNA, 41 bp, Homo sapiens
atgaacactgaataaaaaatkgtcaattcgtcagttgattg

SEQ ID NO: 7108 - DNA, 41 bp, Homo sapiens
ttttccttttttattctttcmttttccctccttttctgaat

SEQ ID NO: 7109 - DNA, 41 bp, Homo sapiens
cccaaggaacatgtggctccmggcacatacctggcacaaca

SEQ ID NO: 7110 - DNA, 41 bp, Homo sapiens
tagaaaatcctccacttgtcmaaaaggaagccatttgcttt

SEQ ID NO: 7111 - DNA, 41 bp, Homo sapiens
cccccatttcaaatacacctrcttagcaggttatcctaaac

SEQ ID NO: 7112 - DNA, 41 bp, Homo sapiens
tttttctgttagcctcttcaytgtaaccaaaagcagcatta

SEQ ID NO: 7113 - DNA, 41 bp, Homo sapiens
tccagtgtctgcctattcccytcttctttttttcttccctt

SEQ ID NO: 7114 - DNA, 50 bp, Homo sapiens
  misc_feature (30)..(30): t is present or absent.
atggtttcgttttctgttggttttttttttctacagaagtctttccattc

SEQ ID NO: 7115 - DNA, 43 bp, Homo sapiens
  misc_feature (21)..(23): aag is present or absent.
taagacaaggtagggaggagaaggaggagaattagaaaaacaa

SEQ ID NO: 7116 - DNA, 41 bp, Homo sapiens
ccccctccattaacaatatcytctcattttattccatttaa

SEQ ID NO: 7117 - DNA, 41 bp, Homo sapiens
  misc_feature (21)..(21): t is present or absent.
gtctgtctgcagggaaaatatattcatgccttttgaaaatt

SEQ ID NO: 7118 - DNA, 41 bp, Homo sapiens
  misc_feature (21)..(21): t is present or absent.
tattgtcagtaatttttttttactttgatgctatactttct

SEQ ID NO: 7119 - DNA, 41 bp, Homo sapiens
ttcatccaatgtgctgcatamataatcagggattctgtacg

SEQ ID NO: 7120 - DNA, 41 bp, Homo sapiens
  misc_feature (21)..(21): t is present or absent.
tcatgctcactttttttttttctcaaaatgatcagtcacac

SEQ ID NO: 7121 - DNA, 41 bp, Homo sapiens
  misc_feature (21)..(21): t is present or absent.
tagagggaatcttttttttttcctttttttctgctgcccag

SEQ ID NO: 7122 - DNA, 41 bp, Homo sapiens
tttttatatagctagggagaytgtaaattaacaagtttcct

SEQ ID NO: 7123 - DNA, 41 bp, Homo sapiens
  misc_feature (21)..(21): t is present or absent.
agtcaagataactttttttttcataaaggaccacagtatgt

SEQ ID NO: 7124 - DNA, 41 bp, Homo sapiens
catgactcagtttccaaccayaacttttcattttggcatag

SEQ ID NO: 7125 - DNA, 41 bp, Homo sapiens
  misc_feature (21)..(21): a is present or absent.
tagtgacttttgaaaaaaaaattagtaataagcaaaagact

SEQ ID NO: 7126 - DNA, 41 bp, Homo sapiens
aaaacttaaggcacttttcaraaatcccattggacctaaag

SEQ ID NO: 7127 - DNA, 41 bp, Homo sapiens
  misc_feature (21)..(21): a is present or absent.
tactttgagccctcattctcaccaagtcacttcagtgtcag

SEQ ID NO: 7128 - DNA, 40 bp, Homo sapiens
tactttgagccctcattctcccaagtcacttcagtgtcag

SEQ ID NO: 7129 - DNA, 41 bp, Homo sapiens; identical to SEQ ID NO: 1580

SEQ ID NO: 7130 - DNA, 41 bp, Homo sapiens; identical to SEQ ID NO: 1581

SEQ ID NO: 7131 - DNA, 41 bp, Homo sapiens; identical to SEQ ID NO: 1582

SEQ ID NO: 7132 - DNA, 41 bp, Homo sapiens; identical to SEQ ID NO: 1583

SEQ ID NO: 7133 - DNA, 41 bp, Homo sapiens; identical to SEQ ID NO: 1584

SEQ ID NO: 7134 - DNA, 56 bp, Homo sapiens
  misc_feature (35)..(36): gt is present or absent.
caacaaattggtgtgtgtgggtgtgtgtgtgtgtgtagaatgccagctcccagatc

SEQ ID NO: 7135 - DNA, 41 bp, Homo sapiens; identical to SEQ ID NO: 1585

SEQ ID NO: 7136 - DNA, 41 bp, Homo sapiens; identical to SEQ ID NO: 1586

SEQ ID NO: 7137 - DNA, 41 bp, Homo sapiens; identical to SEQ ID NO: 1587

SEQ ID NO: 7138 - DNA, 41 bp, Homo sapiens; identical to SEQ ID NO: 1588

SEQ ID NO: 7139 - DNA, 41 bp, Homo sapiens; identical to SEQ ID NO: 1589

SEQ ID NO: 7140 - DNA, 41 bp, Homo sapiens; identical to SEQ ID NO: 1590

SEQ ID NO: 7141 - DNA, 41 bp, Homo sapiens; identical to SEQ ID NO: 1591

SEQ ID NO: 7142 - DNA, 41 bp, Homo sapiens; identical to SEQ ID NO: 1592

SEQ ID NO: 7143 - DNA, 41 bp, Homo sapiens; identical to SEQ ID NO: 1593

SEQ ID NO: 7144 - DNA, 41 bp, Homo sapiens; identical to SEQ ID NO: 1594

SEQ ID NO: 7145 - DNA, 41 bp, Homo sapiens; identical to SEQ ID NO: 1595

SEQ ID NO: 7146 - DNA, 43 bp, Homo sapiens; identical to SEQ ID NO: 1596
  misc_feature (21)..(23): cct is present or absent.

SEQ ID NO: 7147 - DNA, 41 bp, Homo sapiens; identical to SEQ ID NO: 1597

SEQ ID NO: 7148 - DNA, 42 bp, Homo sapiens; identical to SEQ ID NO: 1598
  misc_feature (21)..(22): tc is present or absent.

SEQ ID NO: 7149 - DNA, 40 bp, Homo sapiens; identical to SEQ ID NO: 1599

SEQ ID NO: 7150 - DNA, 41 bp, Homo sapiens; identical to SEQ ID NO: 1600

SEQ ID NO: 7151 - DNA, 41 bp, Homo sapiens; identical to SEQ ID NO: 1601

SEQ ID NO: 7152 - DNA, 41 bp, Homo sapiens; identical to SEQ ID NO: 1602

SEQ ID NO: 7153 - DNA, 41 bp, Homo sapiens; identical to SEQ ID NO: 1603

SEQ ID NO: 7154 - DNA, 41 bp, Homo sapiens; identical to SEQ ID NO: 1604

SEQ ID NO: 7155 - DNA, 41 bp, Homo sapiens; identical to SEQ ID NO: 1605

SEQ ID NO: 7156 - DNA, 41 bp, Homo sapiens; identical to SEQ ID NO: 1606

SEQ ID NO: 7157 - DNA, 41 bp, Homo sapiens; identical to SEQ ID NO: 1607

SEQ ID NO: 7158 - DNA, 41 bp, Homo sapiens; identical to SEQ ID NO: 1608

SEQ ID NO: 7159 - DNA, 41 bp, Homo sapiens; identical to SEQ ID NO: 1609

SEQ ID NO: 7160 - DNA, 41 bp, Homo sapiens; identical to SEQ ID NO: 1610

SEQ ID NO: 7161 - DNA, 41 bp, Homo sapiens; identical to SEQ ID NO: 1611

SEQ ID NO: 7162 - DNA, 41 bp, Homo sapiens; identical to SEQ ID NO: 1612

SEQ ID NO: 7163 - DNA, 41 bp, Homo sapiens; identical to SEQ ID NO: 1613

SEQ ID NO: 7164 - DNA, 42 bp, Homo sapiens; identical to SEQ ID NO: 1616
  misc_feature (21)..(22): ca is present or absent.

SEQ ID NO: 7165 - DNA, 41 bp, Homo sapiens; identical to SEQ ID NO: 1617

SEQ ID NO: 7166 - DNA, 41 bp, Homo sapiens; identical to SEQ ID NO: 1618

SEQ ID NO: 7167 - DNA, 41 bp, Homo sapiens; identical to SEQ ID NO: 1619

SEQ ID NO: 7168 - DNA, 41 bp, Homo sapiens; identical to SEQ ID NO: 1620

SEQ ID NO: 7169 - DNA, 41 bp, Homo sapiens; identical to SEQ ID NO: 1621

SEQ ID NO: 7170 - DNA, 41 bp, Homo sapiens; identical to SEQ ID NO: 1622

SEQ ID NO: 7171 - DNA, 41 bp, Homo sapiens; identical to SEQ ID NO: 1623

SEQ ID NO: 7172 - DNA, 41 bp, Homo sapiens; identical to SEQ ID NO: 1624

SEQ ID NO: 7173 - DNA, 41 bp, Homo sapiens; identical to SEQ ID NO: 1625

SEQ ID NO: 7174 - DNA, 41 bp, Homo sapiens; identical to SEQ ID NO: 1626

SEQ ID NO: 7175 - DNA, 41 bp, Homo sapiens; identical to SEQ ID NO: 1627

SEQ ID NO: 7176 - DNA, 41 bp, Homo sapiens; identical to SEQ ID NO: 1628

SEQ ID NO: 7177 - DNA, 41 bp, Homo sapiens; identical to SEQ ID NO: 1629

SEQ ID NO: 7178 - DNA, 41 bp, Homo sapiens; identical to SEQ ID NO: 1630

SEQ ID NO: 7179 - DNA, 41 bp, Homo sapiens; identical to SEQ ID NO: 1631

SEQ ID NO: 7180 - DNA, 41 bp, Homo sapiens; identical to SEQ ID NO: 1632

SEQ ID NO: 7181 - DNA, 41 bp, Homo sapiens; identical to SEQ ID NO: 1633

SEQ ID NO: 7182 - DNA, 41 bp, Homo sapiens; identical to SEQ ID NO: 1634

SEQ ID NO: 7183 - DNA, 41 bp, Homo sapiens; identical to SEQ ID NO: 1635

SEQ ID NO: 7184 - DNA, 41 bp, Homo sapiens; identical to SEQ ID NO: 1636

SEQ ID NO: 7185 - DNA, 41 bp, Homo sapiens; identical to SEQ ID NO: 1637

SEQ ID NO: 7186 - DNA, 41 bp, Homo sapiens; identical to SEQ ID NO: 1638
  misc_feature (21)..(21): g is present or absent.

SEQ ID NO: 7187 - DNA, 40 bp, Homo sapiens; identical to SEQ ID NO: 1639

SEQ ID NO: 7188 - DNA, 41 bp, Homo sapiens; identical to SEQ ID NO: 1640

SEQ ID NO: 7189 - DNA, 41 bp, Homo sapiens; identical to SEQ ID NO: 1641

SEQ ID NO: 7190 - DNA, 41 bp, Homo sapiens; identical to SEQ ID NO: 1642

SEQ ID NO: 7191 - DNA, 41 bp, Homo sapiens; identical to SEQ ID NO: 1643

SEQ ID NO: 7192 - DNA, 41 bp, Homo sapiens; identical to SEQ ID NO: 1644

SEQ ID NO: 7193 - DNA, 41 bp, Homo sapiens; identical to SEQ ID NO: 1645

SEQ ID NO: 7194 - DNA, 41 bp, Homo sapiens; identical to SEQ ID NO: 1646

SEQ ID NO: 7195 - DNA, 41 bp, Homo sapiens; identical to SEQ ID NO: 1647

SEQ ID NO: 7196 - DNA, 41 bp, Homo sapiens; identical to SEQ ID NO: 1648

SEQ ID NO: 7197 - DNA, 41 bp, Homo sapiens; identical to SEQ ID NO: 1649

SEQ ID NO: 7198 - DNA, 41 bp, Homo sapiens; identical to SEQ ID NO: 1650

SEQ ID NO: 7199 - DNA, 41 bp, Homo sapiens; identical to SEQ ID NO: 1651

SEQ ID NO: 7200 - DNA, 41 bp, Homo sapiens; identical to SEQ ID NO: 1652

SEQ ID NO: 7201 - DNA, 41 bp, Homo sapiens; identical to SEQ ID NO: 1653

SEQ ID NO: 7202 - DNA, 41 bp, Homo sapiens; identical to SEQ ID NO: 1654

SEQ ID NO: 7203 - DNA, 41 bp, Homo sapiens; identical to SEQ ID NO: 1655

SEQ ID NO: 7204 - DNA, 41 bp, Homo sapiens; identical to SEQ ID NO: 1656

SEQ ID NO: 7205 - DNA, 41 bp, Homo sapiens; identical to SEQ ID NO: 1657

SEQ ID NO: 7206 - DNA, 41 bp, Homo sapiens; identical to SEQ ID NO: 1658

SEQ ID NO: 7207 - DNA, 41 bp, Homo sapiens; identical to SEQ ID NO: 1659

SEQ ID NO: 7208 - DNA, 41 bp, Homo sapiens; identical to SEQ ID NO: 1660

SEQ ID NO: 7209 - DNA, 41 bp, Homo sapiens; identical to SEQ ID NO: 1661
  misc_feature (21)..(21): t is present or absent.

SEQ ID NO: 7210 - DNA, 41 bp, Homo sapiens; identical to SEQ ID NO: 1662

SEQ ID NO: 7211 - DNA, 41 bp, Homo sapiens; identical to SEQ ID NO: 1663

SEQ ID NO: 7212 - DNA, 41 bp, Homo sapiens; identical to SEQ ID NO: 1664

SEQ ID NO: 7213 - DNA, 41 bp, Homo sapiens; identical to SEQ ID NO: 1665

SEQ ID NO: 7214 - DNA, 41 bp, Homo sapiens; identical to SEQ ID NO: 1666

SEQ ID NO: 7215 - DNA, 41 bp, Homo sapiens; identical to SEQ ID NO: 1667

SEQ ID NO: 7216 - DNA, 41 bp, Homo sapiens; identical to SEQ ID NO: 1668

SEQ ID NO: 7217 - DNA, 41 bp, Homo sapiens; identical to SEQ ID NO: 1669

SEQ ID NO: 7218 - DNA, 41 bp, Homo sapiens; identical to SEQ ID NO: 1670

SEQ ID NO: 7219 - DNA, 41 bp, Homo sapiens; identical to SEQ ID NO: 1671

SEQ ID NO: 7220 - DNA, 41 bp, Homo sapiens; identical to SEQ ID NO: 1672

SEQ ID NO: 7221 - DNA, 41 bp, Homo sapiens; identical to SEQ ID NO: 1673

SEQ ID NO: 7222 - DNA, 41 bp, Homo sapiens; identical to SEQ ID NO: 1674

SEQ ID NO: 7223 - DNA, 41 bp, Homo sapiens; identical to SEQ ID NO: 1675

SEQ ID NO: 7224 - DNA, 41 bp, Homo sapiens; identical to SEQ ID NO: 1676

SEQ ID NO: 7225 - DNA, 41 bp, Homo sapiens; identical to SEQ ID NO: 1677

SEQ ID NO: 7226 - DNA, 41 bp, Homo sapiens; identical to SEQ ID NO: 1678

SEQ ID NO: 7227 - DNA, 41 bp, Homo sapiens; identical to SEQ ID NO: 1679

SEQ ID NO: 7228 - DNA, 41 bp, Homo sapiens; identical to SEQ ID NO: 1680

SEQ ID NO: 7229 - DNA, 41 bp, Homo sapiens; identical to SEQ ID NO: 1681

SEQ ID NO: 7230 - DNA, 41 bp, Homo sapiens; identical to SEQ ID NO: 1682

SEQ ID NO: 7231 - DNA, 41 bp, Homo sapiens; identical to SEQ ID NO: 1683

SEQ ID NO: 7232 - DNA, 41 bp, Homo sapiens; identical to SEQ ID NO: 1684

SEQ ID NO: 7233 - DNA, 41 bp, Homo sapiens; identical to SEQ ID NO: 1685

SEQ ID NO: 7234 - DNA, 41 bp, Homo sapiens; identical to SEQ ID NO: 1686

SEQ ID NO: 7235 - DNA, 41 bp, Homo sapiens; identical to SEQ ID NO: 1687

SEQ ID NO: 7236 - DNA, 41 bp, Homo sapiens; identical to SEQ ID NO: 1688

SEQ ID NO: 7237 - DNA, 41 bp, Homo sapiens; identical to SEQ ID NO: 1689

SEQ ID NO: 7238 - DNA, 45 bp, Homo sapiens; identical to SEQ ID NO: 1690
  misc_feature (21)..(25): gccag is present or absent.

SEQ ID NO: 7239 - DNA, 40 bp, Homo sapiens; identical to SEQ ID NO: 1691

SEQ ID NO: 7240 - DNA, 41 bp, Homo sapiens; identical to SEQ ID NO: 1692

SEQ ID NO: 7241 - DNA, 41 bp, Homo sapiens; identical to SEQ ID NO: 1693

SEQ ID NO: 7242 - DNA, 41 bp, Homo sapiens; identical to SEQ ID NO: 1694

SEQ ID NO: 7243 - DNA, 41 bp, Homo sapiens; identical to SEQ ID NO: 1695

SEQ ID NO: 7244 - DNA, 41 bp, Homo sapiens; identical to SEQ ID NO: 1696

SEQ ID NO: 7245 - DNA, 41 bp, Homo sapiens; identical to SEQ ID NO: 1697

SEQ ID NO: 7246 - DNA, 41 bp, Homo sapiens; identical to SEQ ID NO: 1698

SEQ ID NO: 7247 - DNA, 41 bp, Homo sapiens; identical to SEQ ID NO: 1699

SEQ ID NO: 7248 - DNA, 41 bp, Homo sapiens; identical to SEQ ID NO: 1700

SEQ ID NO: 7249 - DNA, 41 bp, Homo sapiens; identical to SEQ ID NO: 1701

SEQ ID NO: 7250 - DNA, 41 bp, Homo sapiens; identical to SEQ ID NO: 1614

SEQ ID NO: 7251 - DNA, 41 bp, Homo sapiens; identical to SEQ ID NO: 1615

SEQ ID NO: 7252 - DNA, 41 bp, Homo sapiens
cagcccctagcctcatcttgytgtctccattttgtgctttg

SEQ ID NO: 7253 - DNA, 41 bp, Homo sapiens
atataagacctggtagaatgmatcttctgaaatatgataag

SEQ ID NO: 7254 - DNA, 41 bp, Homo sapiens
taccctggaatcagtgatgasaattctgcccatccgtactc

SEQ ID NO: 7255 - DNA, 41 bp, Homo sapiens; identical to SEQ ID NO: 1268

SEQ ID NO: 7256 - DNA, 41 bp, Homo sapiens; identical to SEQ ID NO: 1269

SEQ ID NO: 7257 - DNA, 41 bp, Homo sapiens; identical to SEQ ID NO: 1270

SEQ ID NO: 7258 - DNA, 41 bp, Homo sapiens; identical to SEQ ID NO: 1271

SEQ ID NO: 7259 - DNA, 41 bp, Homo sapiens; identical to SEQ ID NO: 1272

SEQ ID NO: 7260 - DNA, 41 bp, Homo sapiens; identical to SEQ ID NO: 1273

SEQ ID NO: 7261 - DNA, 41 bp, Homo sapiens; identical to SEQ ID NO: 1274

SEQ ID NO: 7262 - DNA, 41 bp, Homo sapiens; identical to SEQ ID NO: 1275

SEQ ID NO: 7263 - DNA, 41 bp, Homo sapiens; identical to SEQ ID NO: 2073

SEQ ID NO: 7264 - DNA, 41 bp, Homo sapiens; identical to SEQ ID NO: 1276

SEQ ID NO: 7265 - DNA, 41 bp, Homo sapiens; identical to SEQ ID NO: 1277

SEQ ID NO: 7266 - DNA, 41 bp, Homo sapiens; identical to SEQ ID NO: 1278

SEQ ID NO: 7267 - DNA, 41 bp, Homo sapiens; identical to SEQ ID NO: 1279

SEQ ID NO: 7268 - DNA, 41 bp, Homo sapiens; identical to SEQ ID NO: 1280

SEQ ID NO: 7269 - DNA, 41 bp, Homo sapiens; identical to SEQ ID NO: 1281

SEQ ID NO: 7270 - DNA, 41 bp, Homo sapiens; identical to SEQ ID NO: 1282

SEQ ID NO: 7271 - DNA, 41 bp, Homo sapiens; identical to SEQ ID NO: 1283

SEQ ID NO: 7272 - DNA, 41 bp, Homo sapiens; identical to SEQ ID NO: 1284

SEQ ID NO: 7273 - DNA, 41 bp, Homo sapiens; identical to SEQ ID NO: 1285

SEQ ID NO: 7274 - DNA, 41 bp, Homo sapiens; identical to SEQ ID NO: 1286

SEQ ID NO: 7275 - DNA, 41 bp, Homo sapiens; identical to SEQ ID NO: 1287

SEQ ID NO: 7276 - DNA, 41 bp, Homo sapiens; identical to SEQ ID NO: 1288

SEQ ID NO: 7277 - DNA, 41 bp, Homo sapiens; identical to SEQ ID NO: 1289

SEQ ID NO: 7278 - DNA, 41 bp, Homo sapiens; identical to SEQ ID NO: 2074
  misc_feature (21)..(21): a is present or absent.

SEQ ID NO: 7279 - DNA, 41 bp, Homo sapiens; identical to SEQ ID NO: 2022

SEQ ID NO: 7280 - DNA, 41 bp, Homo sapiens; identical to SEQ ID NO: 2023

SEQ ID NO: 7281 - DNA, 41 bp, Homo sapiens; identical to SEQ ID NO: 2024
  misc_feature (21)..(21): g is present or absent.

SEQ ID NO: 7282 - DNA, 41 bp, Homo sapiens; identical to SEQ ID NO: 2025
  misc_feature (21)..(21): t is present or absent.

SEQ ID NO: 7283 - DNA, 41 bp, Homo sapiens; identical to SEQ ID NO: 2026

SEQ ID NO: 7284 - DNA, 41 bp, Homo sapiens; identical to SEQ ID NO: 2027

SEQ ID NO: 7285 - DNA, 41 bp, Homo sapiens; identical to SEQ ID NO: 2028

SEQ ID NO: 7286 - DNA, 41 bp, Homo sapiens; identical to SEQ ID NO: 2029

SEQ ID NO: 7287 - DNA, 43 bp, Homo sapiens; identical to SEQ ID NO: 2030
  misc_feature (21)..(23): aaa is present or absent.

SEQ ID NO: 7288 - DNA, 41 bp, Homo sapiens; identical to SEQ ID NO: 2031
  misc_feature (21)..(21): a is present or absent.

SEQ ID NO: 7289 - DNA, 41 bp, Homo sapiens; identical to SEQ ID NO: 2032

SEQ ID NO: 7290 - DNA, 41 bp, Homo sapiens; identical to SEQ ID NO: 2033

SEQ ID NO: 7291 - DNA, 41 bp, Homo sapiens; identical to SEQ ID NO: 2034

SEQ ID NO: 7292 - DNA, 41 bp, Homo sapiens; identical to SEQ ID NO: 2035

SEQ ID NO: 7293 - DNA, 41 bp, Homo sapiens; identical to SEQ ID NO: 2036

SEQ ID NO: 7294 - DNA, 41 bp, Homo sapiens; identical to SEQ ID NO: 2037

SEQ ID NO: 7295 - DNA, 41 bp, Homo sapiens; identical to SEQ ID NO: 2038

SEQ ID NO: 7296 - DNA, 41 bp, Homo sapiens; identical to SEQ ID NO: 2039

SEQ ID NO: 7297 - DNA, 41 bp, Homo sapiens; identical to SEQ ID NO: 2040

SEQ ID NO: 7298 - DNA, 41 bp, Homo sapiens; identical to SEQ ID NO: 2041

SEQ ID NO: 7299 - DNA, 41 bp, Homo sapiens
  misc_feature (21)..(21): c is present or absent.
gtggtcctgaaggtcctgcactgacatctctgctccccacc

SEQ ID NO: 7300 - DNA, 40 bp, Homo sapiens
gtggtcctgaaggtcctgcatgacatctctgctccccacc

SEQ ID NO: 7301 - DNA, 41 bp, Homo sapiens; identical to SEQ ID NO: 2044

SEQ ID NO: 7302 - DNA, 41 bp, Homo sapiens; identical to SEQ ID NO: 2045

SEQ ID NO: 7303 - DNA, 41 bp, Homo sapiens; identical to SEQ ID NO: 2046

SEQ ID NO: 7304 - DNA, 41 bp, Homo sapiens; identical to SEQ ID NO: 2047

SEQ ID NO: 7305 - DNA, 41 bp, Homo sapiens; identical to SEQ ID NO: 2048

SEQ ID NO: 7306 - DNA, 41 bp, Homo sapiens; identical to SEQ ID NO: 2049

SEQ ID NO: 7307 - DNA, 41 bp, Homo sapiens; identical to SEQ ID NO: 2050

SEQ ID NO: 7308 - DNA, 41 bp, Homo sapiens; identical to SEQ ID NO: 2051

SEQ ID NO: 7309 - DNA, 41 bp, Homo sapiens; identical to SEQ ID NO: 2052

SEQ ID NO: 7310 - DNA, 41 bp, Homo sapiens; identical to SEQ ID NO: 2053

SEQ ID NO: 7311 - DNA, 41 bp, Homo sapiens; identical to SEQ ID NO: 2054

SEQ ID NO: 7312 - DNA, 41 bp, Homo sapiens; identical to SEQ ID NO: 2055

SEQ ID NO: 7313 - DNA, 41 bp, Homo sapiens; identical to SEQ ID NO: 2056

SEQ ID NO: 7314 - DNA, 41 bp, Homo sapiens; identical to SEQ ID NO: 2057

SEQ ID NO: 7315 - DNA, 41 bp, Homo sapiens; identical to SEQ ID NO: 2058

SEQ ID NO: 7316 - DNA, 41 bp, Homo sapiens; identical to SEQ ID NO: 2059

SEQ ID NO: 7317 - DNA, 41 bp, Homo sapiens; identical to SEQ ID NO: 2060

SEQ ID NO: 7318 - DNA, 41 bp, Homo sapiens; identical to SEQ ID NO: 2061

SEQ ID NO: 7319 - DNA, 41 bp, Homo sapiens; identical to SEQ ID NO: 2062

SEQ ID NO: 7320 - DNA, 41 bp, Homo sapiens; identical to SEQ ID NO: 2063

SEQ ID NO: 7321 - DNA, 41 bp, Homo sapiens; identical to SEQ ID NO: 2064

SEQ ID NO: 7322 - DNA, 41 bp, Homo sapiens; identical to SEQ ID NO: 2065

SEQ ID NO: 7323 - DNA, 41 bp, Homo sapiens; identical to SEQ ID NO: 2066

SEQ ID NO: 7324 - DNA, 41 bp, Homo sapiens; identical to SEQ ID NO: 2067

SEQ ID NO: 7325 - DNA, 41 bp, Homo sapiens; identical to SEQ ID NO: 2068

SEQ ID NO: 7326 - DNA, 41 bp, Homo sapiens; identical to SEQ ID NO: 2069

SEQ ID NO: 7327 - DNA, 41 bp, Homo sapiens; identical to SEQ ID NO: 2070

SEQ ID NO: 7328 - DNA, 41 bp, Homo sapiens; identical to SEQ ID NO: 2071

SEQ ID NO: 7329 - DNA, 59 bp, Homo sapiens
  misc_feature (38)..(39): a is present or absent.
caacaagacttgtctctaccaaaaaaaaaaaaaaaaaaagtcaagcatggtggcagaca

SEQ ID NO: 7330 - DNA, 41 bp, Homo sapiens
ggaccaagtggctgcactacrctgggtccagcagaatatcg

SEQ ID NO: 7331 - DNA, 41 bp, Homo sapiens
agcctgctgtgcccacacacrcccactaaggagaaagaagt

SEQ ID NO: 7332 - DNA, 58 bp, Homo sapiens
  misc_feature (37)..(38): a is present or absent.
acacagtgagaccccttctcaaaaaaaaaaaaaaaaaagagagagtgtgtgattagaa

SEQ ID NO: 7333 - DNA, 52 bp, Homo sapiens
  misc_feature (29)..(30): ga is present or absent.
  misc_feature (31)..(32): ga is present or absent.
tcaaaaaaaaaaaaaaaaaagagagagagagagtgtgtgattagaagctaaa

SEQ ID NO: 7334 - DNA, 41 bp, Homo sapiens
ggtcaaggtgagcagaacacstgaggacaggagtttgagac

SEQ ID NO: 7335 - DNA, 41 bp, Homo sapiens
cctcagcttgcacttggcctrctaattcttatataacccaa

SEQ ID NO: 7336 - DNA, 41 bp, Homo sapiens; identical to SEQ ID NO: 592

SEQ ID NO: 7337 - DNA, 41 bp, Homo sapiens; identical to SEQ ID NO: 593

SEQ ID NO: 7338 - DNA, 41 bp, Homo sapiens
gactgcgtgaccaggtagaaytagcctcagcatggaagggt

SEQ ID NO: 7339 - DNA, 41 bp, Homo sapiens; identical to SEQ ID NO: 595

SEQ ID NO: 7340 - DNA, 41 bp, Homo sapiens; identical to SEQ ID NO: 596

SEQ ID NO: 7341 - DNA, 41 bp, Homo sapiens; identical to SEQ ID NO: 597

SEQ ID NO: 7342 - DNA, 41 bp, Homo sapiens; identical to SEQ ID NO: 598

SEQ ID NO: 7343 - DNA, 41 bp, Homo sapiens
tgtttagcaaatgtttactgygagcctgttatgtgctgagc

SEQ ID NO: 7344 - DNA, 41 bp, Homo sapiens
ggctgataccacatcctacarttcacttcataggcttgggt

SEQ ID NO: 7345 - DNA, 41 bp, Homo sapiens
gtgcggtggcttcctgatacragacgacttcgtgctgacag

SEQ ID NO: 7346 - DNA, 41 bp, Homo sapiens
  misc_feature (21)..(21): a is present or absent.
tgggggcatactttggcataagaatacaaactgaagcaatt

SEQ ID NO: 7347 - DNA, 40 bp, Homo sapiens
tgggggcatactttggcatagaatacaaactgaagcaatt

SEQ ID NO: 7348 - DNA, 41 bp, Homo sapiens
atttctctctggaaagagaaraggggactagactgagctgg

SEQ ID NO: 7349 - DNA, 41 bp, Homo sapiens
gggcctctgcaaacttaccargaggcttatggtggatggtg

SEQ ID NO: 7350 - DNA, 41 bp, Homo sapiens
attctcaggcaccacatctgygctatgcaggccaatgacac

SEQ ID NO: 7351 - DNA, 41 bp, Homo sapiens
tccacaccagtttctccaggkcctgcccttctgccaaggct

SEQ ID NO: 7352 - DNA, 41 bp, Homo sapiens
ccactttggtcctggggcttwgggtaaacttcttacctcct

SEQ ID NO: 7353 - DNA, 41 bp, Homo sapiens
ctgagctcaaggctcagctcrtcctccagcctcttggctgc

SEQ ID NO: 7354 - DNA, 41 bp, Homo sapiens; identical to SEQ ID NO: 602

SEQ ID NO: 7355 - DNA, 41 bp, Homo sapiens; identical to SEQ ID NO: 603

SEQ ID NO: 7356 - DNA, 41 bp, Homo sapiens; identical to SEQ ID NO: 604

SEQ ID NO: 7357 - DNA, 41 bp, Homo sapiens; identical to SEQ ID NO: 605

SEQ ID NO: 7358 - DNA, 41 bp, Homo sapiens
ttttgggaacacctgtctagrttgttaagagccagtggaat

SEQ ID NO: 7359 - DNA, 41 bp, Homo sapiens; identical to SEQ ID NO: 607

SEQ ID NO: 7360 - DNA, 41 bp, Homo sapiens; identical to SEQ ID NO: 608

SEQ ID NO: 7361 - DNA, 41 bp, Homo sapiens; identical to SEQ ID NO: 609

SEQ ID NO: 7362 - DNA, 41 bp, Homo sapiens; identical to SEQ ID NO: 610

SEQ ID NO: 7363 - DNA, 41 bp, Homo sapiens; identical to SEQ ID NO: 611

SEQ ID NO: 7364 - DNA, 41 bp, Homo sapiens; identical to SEQ ID NO: 612

SEQ ID NO: 7365 - DNA, 41 bp, Homo sapiens; identical to SEQ ID NO: 613

SEQ ID NO: 7366 - DNA, 41 bp, Homo sapiens; identical to SEQ ID NO: 614

SEQ ID NO: 7367 - DNA, 41 bp, Homo sapiens; identical to SEQ ID NO: 615

SEQ ID NO: 7368 - DNA, 41 bp, Homo sapiens; identical to SEQ ID NO: 616

SEQ ID NO: 7369 - DNA, 41 bp, Homo sapiens; identical to SEQ ID NO: 617

SEQ ID NO: 7370 - DNA, 41 bp, Homo sapiens; identical to SEQ ID NO: 618

SEQ ID NO: 7371 - DNA, 41 bp, Homo sapiens; identical to SEQ ID NO: 619

SEQ ID NO: 7372 - DNA, 41 bp, Homo sapiens; identical to SEQ ID NO: 620

SEQ ID NO: 7373 - DNA, 41 bp, Homo sapiens; identical to SEQ ID NO: 621

SEQ ID NO: 7374 - DNA, 41 bp, Homo sapiens; identical to SEQ ID NO: 622

SEQ ID NO: 7375 - DNA, 46 bp, Homo sapiens
  misc_feature (25)..(26): tc is present or absent.
ctgccaacaaagtctgaaaatctctcaagtttgttataaaaacagc

SEQ ID NO: 7376 - DNA, 41 bp, Homo sapiens; identical to SEQ ID NO: 623

SEQ ID NO: 7377 - DNA, 41 bp, Homo sapiens; identical to SEQ ID NO: 624

SEQ ID NO: 7378 - DNA, 41 bp, Homo sapiens; identical to SEQ ID NO: 625

SEQ ID NO: 7379 - DNA, 41 bp, Homo sapiens; identical to SEQ ID NO: 626

SEQ ID NO: 7380 - DNA, 41 bp, Homo sapiens; identical to SEQ ID NO: 627

SEQ ID NO: 7381 - DNA, 47 bp, Homo sapiens
  misc_feature (27)..(27): a is present or absent.
tggatcaaggcaaataatttaaaaaaaggaaattatttgaagaaaaa

SEQ ID NO: 7382 - DNA, 41 bp, Homo sapiens
atctctaccaaggtaccaatkccttaaggaagatgttaatt

SEQ ID NO: 7383 - DNA, 55 bp, Homo sapiens
  misc_feature (34)..(35): a is present or absent.
taatgacattaatacttagcaaaaaaaaaaaaaaactgaatatgactaaaactga

SEQ ID NO: 7384 - DNA, 41 bp, Homo sapiens
ttaagttaaatgtaaacagcrcctttgcacactattcagtg

SEQ ID NO: 7385 - DNA, 50 bp, Homo sapiens
  misc_feature (0)..(30): t is present or absent.
ttaattttttagttaggttgttttttttttctcttttattttatcacatg

SEQ ID NO: 7386 - DNA, 41 bp, Homo sapiens
agaatttgagtctattcttgkgtgccttctgactacatcct

SEQ ID NO: 7387 - DNA, 54 bp, Homo sapiens
  misc_feature (32)..(34): a is present or absent.
gcaagttttaactgaattacaaaaaaaaaaaaaagcagatgataatcattctat

SEQ ID NO: 7388 - DNA, 41 bp, Homo sapiens
tagattttgatgagtttgagkttttttttttttttttccaa

SEQ ID NO: 7389 - DNA, 57 bp, Homo sapiens
  misc_feature (35)..(37): a is present or absent.
tagattttgatgagtttgagaaaaaaaaaaaaaaaaaccaaaagggtgggggttgtt

SEQ ID NO: 7390 - DNA, 49 bp, Homo sapiens
  misc_feature (29)..(29): a is present or absent.
tcaactttgctggtaaccagaaaaaaaaagaaaagccactattaatatc

SEQ ID NO: 7391 - DNA, 41 bp, Homo sapiens
aaatttgtaagtgaatgttakataaaaatctgtaacaatta

SEQ ID NO: 7392 - DNA, 41 bp, Homo sapiens
taattcaaatggattaatcawtgataatttctatttttaaa

SEQ ID NO: 7393 - DNA, 41 bp, Homo sapiens
caggcctaataaatgaaatgytcactactgttgccaacacc

SEQ ID NO: 7394 - DNA, 41 bp, Homo sapiens
attcgggagtcctgtctgccmtttgtagaaaccatccagct

SEQ ID NO: 7395 - DNA, 41 bp, Homo sapiens
cagctcatcttcctactcttwgtgttggggatttttgcccc

SEQ ID NO: 7396 - DNA, 41 bp, Homo sapiens
gtttctgtcaactctccagayataaaatcaaatgctcttcc

SEQ ID NO: 7397 - DNA, 41 bp, Homo sapiens
  misc_feature (21)..(21): g is present or absent.
caatttcttcacaatacctggattgctgccaggcagcaata

SEQ ID NO: 7398 - DNA, 40 bp, Homo sapiens
caatttcttcacaatacctgattgctgccaggcagcaata

SEQ ID NO: 7399 - DNA, 41 bp, Homo sapiens
gaaagagaaacttgtgtcccmgaaacttgtgtaagtatgcc

SEQ ID NO: 7400 - DNA, 41 bp, Homo sapiens
ttgaaactgcactgacactartttaaattttacaagtaatt

SEQ ID NO: 7401 - DNA, 41 bp, Homo sapiens
gaaactgcactgacactaatktaaattttacaagtaatttt

SEQ ID NO: 7402 - DNA, 41 bp, Homo sapiens
acatgagaaaagaaatggagmtaagtttaaaaacagaatga

SEQ ID NO: 7403 - DNA, 41 bp, Homo sapiens
aatagttctcagtagatattmttttacctatatttagtata

SEQ ID NO: 7404 - DNA, 41 bp, Homo sapiens
tactttgtcctcaccaatgcrtattcttcccctaaacagat

SEQ ID NO: 7405 - DNA, 41 bp, Homo sapiens
ctccagccagagaggacagayagctgagtttctgtttggct

SEQ ID NO: 7406 - DNA, 41 bp, Homo sapiens
agcaccatggactgtttttgsagtcctcctctttattatgc

SEQ ID NO: 7407 - DNA, 41 bp, Homo sapiens
tcagtcaaacttaaaggctcmgagatctattaatgcttatg

SEQ ID NO: 7408 - DNA, 41 bp, Homo sapiens
gtgtcagcatctgtagagtamgggagggtgttgaaagaaaa

SEQ ID NO: 7409 - DNA, 41 bp, Homo sapiens
tctcgcaggtaaatgaggatrgaatactttaaatacaaatc

SEQ ID NO: 7410 - DNA, 41 bp, Homo sapiens
ataagtttggaaaatttgtgstaaaatacactaaatatttc

SEQ ID NO: 7411 - DNA, 41 bp, Homo sapiens
tggtggagaaataggttatartgctggtcaaactgtcccat

SEQ ID NO: 7412 - DNA, 41 bp, Homo sapiens
cagaaattgtactttaaaatrcgaactgcaagcactgcagt

SEQ ID NO: 7413 - DNA, 41 bp, Homo sapiens
agaaattgtactttaaaataygaactgcaagcactgcagtc

SEQ ID NO: 7414 - DNA, 41 bp, Homo sapiens
acccagaaaggagcatgtccstttgtcatttgtggtgaaac

SEQ ID NO: 7415 - DNA, 41 bp, Homo sapiens
aaaaaaaacttcaaaatactscaatatccaaagttggtaca

SEQ ID NO: 7416 - DNA, 41 bp, Homo sapiens
cagtctttaggcacaaagagrcaaagagtcttctcatctct

SEQ ID NO: 7417 - DNA, 57 bp, Homo sapiens
  misc_feature (35)..(37): t is present or absent.
ctgggttgtttctcataaagtttttttttttttttttaatgtgggatagtggtataa

SEQ ID NO: 7418 - DNA, 41 bp, Homo sapiens
tttcaggcttctggacagaayagtattatgataaaagctat

SEQ ID NO: 7419 - DNA, 41 bp, Homo sapiens
tatgataaaagctattaatawttaggaagattcctctgact

SEQ ID NO: 7420 - DNA, 41 bp, Homo sapiens
aattagaaaagcaagttttgsgggggggggtgcaaaacaaa

SEQ ID NO: 7421 - DNA, 49 bp, Homo sapiens
  misc_feature (28)..(29): g is present or absent.
attagaaaagcaagttttgggggggggggtgcaaaacaaaaaagaaaaa

SEQ ID NO: 7422 - DNA, 41 bp, Homo sapiens
cacacccataaccaccagttmgttgcctctcctgagccatg

SEQ ID NO: 7423 - DNA, 41 bp, Homo sapiens
cagagtaacattcgggctccwactgtcctttcttatagaga

SEQ ID NO: 7424 - DNA, 41 bp, Homo sapiens
aaggctgtctcctgctgtttstggatccaaggcctgctgaa

SEQ ID NO: 7425 - DNA, 41 bp, Homo sapiens
gctgtgtttgcatgcctcacmgagcatattcactgtcctat

SEQ ID NO: 7426 - DNA, 50 bp, Homo sapiens
  misc_feature (30)..(30): a is present or absent.
tctgtttttgaaaaaacaagaaaaaaaaaatctctccctgcctttggaaa

SEQ ID NO: 7427 - DNA, 41 bp, Homo sapiens
aatgttgccttactttccacrtatttccagaagccctgatc

SEQ ID NO: 7428 - DNA, 41 bp, Homo sapiens
tatgactgtcaggaagaaaaytagaattatctttgtgtcct

SEQ ID NO: 7429 - DNA, 41 bp, Homo sapiens
ggggtttgaaatctatggagycatttccttctttttaaaaa

SEQ ID NO: 7430 - DNA, 41 bp, Homo sapiens
ctggaaagaaattttgtgtcwctgcattatttaaatgttag

SEQ ID NO: 7431 - DNA, 41 bp, Homo sapiens
caatggtcattatatcttccrtgtgtgaagacagtcaagaa

SEQ ID NO: 7432 - DNA, 41 bp, Homo sapiens
caacaggataatcccagaatsctctgtctgcccttggctct

SEQ ID NO: 7433 - DNA, 41 bp, Homo sapiens
tattttgttcctcatattcaygacatgacacaccaacataa

SEQ ID NO: 7434 - DNA, 50 bp, Homo sapiens
  misc_feature (30)..(30): a is present or absent.
ttggttcctgttttttctttaaaaaaaaaacaactctgctaacaggggcc

SEQ ID NO: 7435 - DNA, 41 bp, Homo sapiens
agctcaggggagagaacactsgggggaggcaagaaagcggg

SEQ ID NO: 7436 - DNA, 47 bp, Homo sapiens
  misc_feature (27)..(27): g is present or absent.
tggcggctggcccaaggggtgggggggtgggactcctctgacgcctc

SEQ ID NO: 7437 - DNA, 41 bp, Homo sapiens
gctgcccacggaagctggggsctgttcgcctcttctcctgt

SEQ ID NO: 7438 - DNA, 41 bp, Homo sapiens
tcttctcctgtgtccatgaarcctcaggcctccaggtgcag

SEQ ID NO: 7439 - DNA, 41 bp, Homo sapiens
ccccggggtctcctcctggcytcttcttgccgccgcctgct

SEQ ID NO: 7440 - DNA, 41 bp, Homo sapiens
agcagcagctgggccggtccrtgcagggagtgaggtgggca

SEQ ID NO: 7441 - DNA, 41 bp, Homo sapiens
acagggaggaaacagcaaaayctcaacactgttgatctcat

SEQ ID NO: 7442 - DNA, 41 bp, Homo sapiens
gttggccatgagagaaaacayaggaaggtattggaaaatga

SEQ ID NO: 7443 - DNA, 41 bp, Homo sapiens
  misc_feature (21)..(21): g is present or absent.
attctgcactggctgggaaggcttggcttgggcttcctggc

SEQ ID NO: 7444 - DNA, 41 bp, Homo sapiens
ccacattagggagtggaatgyaacatctgaattaattttca

SEQ ID NO: 7445 - DNA, 41 bp, Homo sapiens
agatcagacatcccccacccyatcgcctagagaactgagcc

SEQ ID NO: 7446 - DNA, 41 bp, Homo sapiens
gctgctcaccatgacctagcyttcagggctgaccccagtcc

SEQ ID NO: 7447 - DNA, 41 bp, Homo sapiens
tcctggggctccaggatgcaygtggaaatccctgggagcag

SEQ ID NO: 7448 - DNA, 41 bp, Homo sapiens
aattacttgaaccccattccwtcccaccccaacccttttcc

SEQ ID NO: 7449 - DNA, 41 bp, Homo sapiens
tacttgaaccccattccatcycaccccaacccttttcctcc

SEQ ID NO: 7450 - DNA, 41 bp, Homo sapiens
tgctccaagccctccccctgmgcccagcacgaccccatctc

SEQ ID NO: 7451 - DNA, 41 bp, Homo sapiens
gctggctcgtgggatgtctayggggcttgcctggcaccccc

SEQ ID NO: 7452 - DNA, 41 bp, Homo sapiens
ccccagcgcccctcagcccgrcctgagacttatcactgccc

SEQ ID NO: 7453 - DNA, 41 bp, Homo sapiens
tcctggaactaggggtggggrggcactgccagtggccaggg

SEQ ID NO: 7454 - DNA, 41 bp, Homo sapiens
gggggcactgccagtggccargggaggggactgcggggcac

SEQ ID NO: 7455 - DNA, 41 bp, Homo sapiens
gtgggatcgacttgcattttsgggggagaagcatccctggt

SEQ ID NO: 7456 - DNA, 41 bp, Homo sapiens
ggcccagcacatggcttccaygaggctctaagctccccaag

SEQ ID NO: 7457 - DNA, 41 bp, Homo sapiens
gccctttcttccaggttgtcmtgggcactgatggtcaccag

SEQ ID NO: 7458 - DNA, 49 bp, Homo sapiens
  misc_feature (29)..(29): a is present or absent.
tccggacttctcattggctcaaaaaaaaactcgctcggccctcggattc

SEQ ID NO: 7459 - DNA, 41 bp, Homo sapiens
ttatttcagggctggccatcytagctgcctgcaggagctgt

SEQ ID NO: 7460 - DNA, 41 bp, Homo sapiens
gacgggtgatgcgagggactygctgtcccccagtgtctggg

SEQ ID NO: 7461 - DNA, 46 bp, Homo sapiens
  misc_feature (25)..(26): c is present or absent.
gctggcagtgctggcctgtgcccccctcacatgtggtcgggttggg

SEQ ID NO: 7462 - DNA, 41 bp, Homo sapiens
tgccggactggccctgcggcrgggcgggtgagggcggctgc

SEQ ID NO: 7463 - DNA, 41 bp, Homo sapiens
gtggggagcggccttggtgaygggatttctgggtcccgtag

SEQ ID NO: 7464 - DNA, 41 bp, Homo sapiens
aacatggacggccacatcttygccagcatcgacatgcctgc

SEQ ID NO: 7465 - DNA, 41 bp, Homo sapiens
tcaggggcgacccgtgcgggrgggccgccgggaaagcactg

SEQ ID NO: 7466 - DNA, 41 bp, Homo sapiens
ggggtgagtatgcacacaccytcctgttggcacaggctgag

SEQ ID NO: 7467 - DNA, 41 bp, Homo sapiens
acgacctttgatgtctacacygagtcctgggcccaggaccc

SEQ ID NO: 7468 - DNA, 41 bp, Homo sapiens
cccacgggtgactccggggcmccccccgtgacccccacggg

SEQ ID NO: 7469 - DNA, 41 bp, Homo sapiens
gttttagcgtcccatgagccytggtatcaagaggccacaag

SEQ ID NO: 7470 - DNA, 41 bp, Homo sapiens
cctgagaaggaactattctcraggacctgagtccaagttca

SEQ ID NO: 7471 - DNA, 41 bp, Homo sapiens
tgccccccttttctccatctycatcacctttgtccagtctc

SEQ ID NO: 7472 - DNA, 41 bp, Homo sapiens
ccctgaacccactgcgacacrccacgtaagtgaccacagaa

SEQ ID NO: 7473 - DNA, 41 bp, Homo sapiens
gtggtgagtcctgcactaacrtgcgatgctcttgctgattt

SEQ ID NO: 7474 - DNA, 41 bp, Homo sapiens
ctgtatatgtaggataggaartgaaagctttggtaggtatt

SEQ ID NO: 7475 - DNA, 41 bp, Homo sapiens
ctgagaacaatggtgcaggargatatttctacctagaaaat

SEQ ID NO: 7476 - DNA, 41 bp, Homo sapiens
tattttgatcatttgacttcwtacaaataagtctctgttct

SEQ ID NO: 7477 - DNA, 41 bp, Homo sapiens
agctgatggggcagaacgaaytttaagtatgagaaaagttc

SEQ ID NO: 7478 - DNA, 41 bp, Homo sapiens
ccctgaatctttttccttctkcctctccctcattcctaaca

SEQ ID NO: 7479 - DNA, 41 bp, Homo sapiens
ataatgtgaagaagaaaaaaragacactgctactgggctcc

SEQ ID NO: 7480 - DNA, 41 bp, Homo sapiens
cactcctgcaccccgacaaasgaacaacagcaccgtgctgc

SEQ ID NO: 7481 - DNA, 41 bp, Homo sapiens
ccccgacaaacgaacaacagyaccgtgctgcacggcgtcct

SEQ ID NO: 7482 - DNA, 41 bp, Homo sapiens
atgcgtagaacgcgagcgctyggcaaggctcggctcggaag

SEQ ID NO: 7483 - DNA, 55 bp, Homo sapiens
  misc_feature (21)..(35): ggcgaaggcggcggc is present or absent.
tgggcggaagcggcggcggcggcgaaggcggcggctgtcagagctggagggccgg

SEQ ID NO: 7484 - DNA, 41 bp, Homo sapiens
aggtgtctgtcgctcgggacytcggagtcttttctgtctgc

SEQ ID NO: 7485 - DNA, 43 bp, Homo sapiens
  misc_feature (21)..(23): ata is present or absent.
aattttttattataataataatatataagtagaagaattatat

SEQ ID NO: 7486 - DNA, 40 bp, Homo sapiens
aattttttattataataatatataagtagaagaattatat

SEQ ID NO: 7487 - DNA, 41 bp, Homo sapiens
aggtggattcacaccacccargctaactgctaacattttag

SEQ ID NO: 7488 - DNA, 52 bp, Homo sapiens
  misc_feature (32)..(32): t is present or absent.
tgatcatttcaaacacagggttttttttttttaattgtaaaagtaggacatt

SEQ ID NO: 7489 - DNA, 54 bp, Homo sapiens
  misc_feature (33)..(34): t is present or absent.
aaagtaggacattttaatgattttttttttttttgaagacgtgagtggtaaaag

SEQ ID NO: 7490 - DNA, 41 bp, Homo sapiens
cctgactcatggcaatctggmgtcaggatctaacaatatat

SEQ ID NO: 7491 - DNA, 41 bp, Homo sapiens
ttgttagctttggctgacatrgagtagatttgcagtgaact

SEQ ID NO: 7492 - DNA, 41 bp, Homo sapiens
taagatatagtgatgcatttytaatatgatttttgtttcct

SEQ ID NO: 7493 - DNA, 50 bp, Homo sapiens
  misc_feature (30)..(30): t is present or absent.
taccaactaatgttccattgttttttttttctttctttcttttaccagtt

SEQ ID NO: 7494 - DNA, 41 bp, Homo sapiens
tacagaaaaggtaattgttawgtaaaatagaaagtttctgg

SEQ ID NO: 7495 - DNA, 54 bp, Homo sapiens
  misc_feature (33)..(34): ta is present or absent.
cttaaatacagttttttcaatatatatatatataaggaatcttctttgcttatt

SEQ ID NO: 7496 - DNA, 41 bp, Homo sapiens
tcaagtctacatattttagtytttttttctagaatgatata

SEQ ID NO: 7497 - DNA, 82 bp, Homo sapiens
  misc_feature (21)..(62): tgtatacgta tacatacgta tacatatata catacgtata ta is present or absent.
tacatacgtatacgtatatatgtatacgtatacatacgtatacatatatacatacgtatatacgtacgtatatacgtatacg

SEQ ID NO: 7498 - DNA, 40 bp, Homo sapiens
tacatacgtatacgtatatacgtacgtatatacgtatacg

SEQ ID NO: 7499 - DNA, 41 bp, Homo sapiens
aggcagtcagctatagagccyacatttttgatgcttattat

SEQ ID NO: 7500 - DNA, 41 bp, Homo sapiens
acctctattaagtttttgcayaccctttcagactttccaat

SEQ ID NO: 7501 - DNA, 41 bp, Homo sapiens
tttctaggggtttcctagtgygtagagcagtgattctcaag

SEQ ID NO: 7502 - DNA, 41 bp, Homo sapiens
tctgcaagtcaaatgtgaagscaagaaagaaaaatccaaaa

SEQ ID NO: 7503 - DNA, 44 bp, Homo sapiens
  misc_feature (21)..(24): attt is present or absent.
atgtgagtaaaccacaatttatttttcatttccttaacttttga

SEQ ID NO: 7504 - DNA, 41 bp, Homo sapiens
tcctctgtttagaatctactkggcttttttggcccagccag

SEQ ID NO: 7505 - DNA, 41 bp, Homo sapiens
tgtcagtggcagtaaatagtwtaaagtttcatcttcattag

SEQ ID NO: 7506 - DNA, 41 bp, Homo sapiens
gaaacaatacatgtatcatgyggttcaagatgtagagtcca

SEQ ID NO: 7507 - DNA, 41 bp, Homo sapiens
ttattttaaaggaaaattctyagaccgaacttaccagttca

SEQ ID NO: 7508 - DNA, 41 bp, Homo sapiens
tttactaaaaaatctacagamatccatttagaattaattta

SEQ ID NO: 7509 - DNA, 41 bp, Homo sapiens
agtcaaattagttgacagttratgggcgagtgaccttgcaa

SEQ ID NO: 7510 - DNA, 43 bp, Homo sapiens
  misc_feature (21)..(23): cct is present or absent.
ttttttaattatgtagtcctcctcgccatcctcatcacagcct

SEQ ID NO: 7511 - DNA, 41 bp, Homo sapiens
ttgatctgatctttcctgccyattcagtttctaaagatctt

SEQ ID NO: 7512 - DNA, 41 bp, Homo sapiens
caaatttatgatttctctttyataggctaatgatatctgca

SEQ ID NO: 7513 - DNA, 41 bp, Homo sapiens
taagaacaattaaaagtcaayggcaagcattctttccttcc

SEQ ID NO: 7514 - DNA, 41 bp, Homo sapiens
tccatttctgctgagtatcarcaaactcacatctctttcta

SEQ ID NO: 7515 - DNA, 41 bp, Homo sapiens
cttttagattaaaggtgcaaygatgcacaattttgagtcac

SEQ ID NO: 7516 - DNA, 41 bp, Homo sapiens
tattcagttctctgactccarttgtactacttttacctcta

SEQ ID NO: 7517 - DNA, 41 bp, Homo sapiens
ttagccttaaaaaattggacwctcttctgattattgataaa

SEQ ID NO: 7518 - DNA, 41 bp, Homo sapiens
actcattatcactgtcttcamatatttaaagaaatatgttc

SEQ ID NO: 7519 - DNA, 44 bp, Homo sapiens
  misc_feature (21)..(24): tgtt is present or absent.
agtcttaatttcaaattgtttgttaagcatcaaagcaagagaaa

SEQ ID NO: 7520 - DNA, 41 bp, Homo sapiens
  misc_feature (21)..(21): a is present or absent.
catgtattcatttcattcagataagtatgcaatgtgcatat

SEQ ID NO: 7521 - DNA, 40 bp, Homo sapiens
catgtattcatttcattcagtaagtatgcaatgtgcatat

SEQ ID NO: 7522 - DNA, 41 bp, Homo sapiens
catgtattcatttcattcagyaagtatgcaatgtgcatata

SEQ ID NO: 7523 - DNA, 41 bp, Homo sapiens
gaagaagtcattattttggtrgtatataatggacctccagg

SEQ ID NO: 7524 - DNA, 41 bp, Homo sapiens
ttttgaagatgtgccttgctrattgagtctacaaaatctgc

SEQ ID NO: 7525 - DNA, 41 bp, Homo sapiens
actcggttttactagttagakagctgtcttggctcagaggc

SEQ ID NO: 7526 - DNA, 41 bp, Homo sapiens
taggtacattacaaagatggrcagttgctgattcattgcaa

SEQ ID NO: 7527 - DNA, 41 bp, Homo sapiens
ttaatgtattaattccctackctaataaattgtaaggttaa

SEQ ID NO: 7528 - DNA, 41 bp, Homo sapiens
tctctgagcctcatggattcwtctgcagcgtatgcatttac

SEQ ID NO: 7529 - DNA, 41 bp, Homo sapiens
ctctatgaacaaatgtaaaawttgaaaaggcaagaatagta

SEQ ID NO: 7530 - DNA, 41 bp, Homo sapiens
aagacttgctcattatatccsagatttcatcaaatccagga

SEQ ID NO: 7531 - DNA, 50 bp, Homo sapiens
  misc_feature (30)..(30): t is present or absent.
tttacactgaaaaatcatacttttttttttcctccataggatgccataga

SEQ ID NO: 7532 - DNA, 41 bp, Homo sapiens; identical to SEQ ID NO: 628

SEQ ID NO: 7533 - DNA, 41 bp, Homo sapiens; identical to SEQ ID NO: 629

SEQ ID NO: 7534 - DNA, 41 bp, Homo sapiens; identical to SEQ ID NO: 630

SEQ ID NO: 7535 - DNA, 41 bp, Homo sapiens; identical to SEQ ID NO: 631

SEQ ID NO: 7536 - DNA, 41 bp, Homo sapiens; identical to SEQ ID NO: 632

SEQ ID NO: 7537 - DNA, 41 bp, Homo sapiens; identical to SEQ ID NO: 633

SEQ ID NO: 7538 - DNA, 41 bp, Homo sapiens; identical to SEQ ID NO: 634
  misc_feature (21)..(21): a is present or absent.

SEQ ID NO: 7539 - DNA, 41 bp, Homo sapiens; identical to SEQ ID NO: 1331

SEQ ID NO: 7540 - DNA, 41 bp, Homo sapiens; identical to SEQ ID NO: 1332

SEQ ID NO: 7541 - DNA, 41 bp, Homo sapiens; identical to SEQ ID NO: 1333

SEQ ID NO: 7542 - DNA, 41 bp, Homo sapiens; identical to SEQ ID NO: 1334

SEQ ID NO: 7543 - DNA, 41 bp, Homo sapiens; identical to SEQ ID NO: 1335

SEQ ID NO: 7544 - DNA, 41 bp, Homo sapiens; identical to SEQ ID NO: 1336

SEQ ID NO: 7545 - DNA, 41 bp, Homo sapiens; identical to SEQ ID NO: 1337

SEQ ID NO: 7546 - DNA, 41 bp, Homo sapiens; identical to SEQ ID NO: 1338

SEQ ID NO: 7547 - DNA, 41 bp, Homo sapiens; identical to SEQ ID NO: 1290

SEQ ID NO: 7548 - DNA, 41 bp, Homo sapiens; identical to SEQ ID NO: 1291

SEQ ID NO: 7549 - DNA, 41 bp, Homo sapiens; identical to SEQ ID NO: 1292

SEQ ID NO: 7550 - DNA, 41 bp, Homo sapiens; identical to SEQ ID NO: 1293

SEQ ID NO: 7551 - DNA, 41 bp, Homo sapiens; identical to SEQ ID NO: 1294

SEQ ID NO: 7552 - DNA, 41 bp, Homo sapiens; identical to SEQ ID NO: 1295

SEQ ID NO: 7553 - DNA, 41 bp, Homo sapiens; identical to SEQ ID NO: 1296

SEQ ID NO: 7554 - DNA, 41 bp, Homo sapiens; identical to SEQ ID NO: 1297

SEQ ID NO: 7555 - DNA, 41 bp, Homo sapiens; identical to SEQ ID NO: 1298

SEQ ID NO: 7556 - DNA, 41 bp, Homo sapiens; identical to SEQ ID NO: 1299

SEQ ID NO: 7557 - DNA, 41 bp, Homo sapiens; identical to SEQ ID NO: 1300

SEQ ID NO: 7558 - DNA, 41 bp, Homo sapiens; identical to SEQ ID NO: 1301

SEQ ID NO: 7559 - DNA, 41 bp, Homo sapiens; identical to SEQ ID NO: 1302

SEQ ID NO: 7560 - DNA, 41 bp, Homo sapiens; identical to SEQ ID NO: 1303

SEQ ID NO: 7561 - DNA, 41 bp, Homo sapiens; identical to SEQ ID NO: 1304

SEQ ID NO: 7562 - DNA, 41 bp, Homo sapiens; identical to SEQ ID NO: 1305

SEQ ID NO: 7563 - DNA, 41 bp, Homo sapiens; identical to SEQ ID NO: 1306

SEQ ID NO: 7564 - DNA, 41 bp, Homo sapiens; identical to SEQ ID NO: 1307

SEQ ID NO: 7565 - DNA, 41 bp, Homo sapiens; identical to SEQ ID NO: 1308

SEQ ID NO: 7566 - DNA, 41 bp, Homo sapiens; identical to SEQ ID NO: 1309
  misc_feature (21)..(21): a is present or absent.

SEQ ID NO: 7567 - DNA, 41 bp, Homo sapiens; identical to SEQ ID NO: 1310

SEQ ID NO: 7568 - DNA, 41 bp, Homo sapiens; identical to SEQ ID NO: 1311

SEQ ID NO: 7569 - DNA, 41 bp, Homo sapiens; identical to SEQ ID NO: 1312

SEQ ID NO: 7570 - DNA, 41 bp, Homo sapiens; identical to SEQ ID NO: 1313

SEQ ID NO: 7571 - DNA, 41 bp, Homo sapiens; identical to SEQ ID NO: 1314

SEQ ID NO: 7572 - DNA, 41 bp, Homo sapiens; identical to SEQ ID NO: 1315

SEQ ID NO: 7573 - DNA, 41 bp, Homo sapiens; identical to SEQ ID NO: 1316

SEQ ID NO: 7574 - DNA, 41 bp, Homo sapiens; identical to SEQ ID NO: 1317

SEQ ID NO: 7575 - DNA, 41 bp, Homo sapiens; identical to SEQ ID NO: 1318

SEQ ID NO: 7576 - DNA, 41 bp, Homo sapiens; identical to SEQ ID NO: 1319

SEQ ID NO: 7577 - DNA, 41 bp, Homo sapiens; identical to SEQ ID NO: 1320

SEQ ID NO: 7578 - DNA, 41 bp, Homo sapiens; identical to SEQ ID NO: 1321

SEQ ID NO: 7579 - DNA, 41 bp, Homo sapiens; identical to SEQ ID NO: 1322

SEQ ID NO: 7580 - DNA, 41 bp, Homo sapiens; identical to SEQ ID NO: 1323

SEQ ID NO: 7581 - DNA, 41 bp, Homo sapiens; identical to SEQ ID NO: 1324

SEQ ID NO: 7582 - DNA, 41 bp, Homo sapiens; identical to SEQ ID NO: 1325

SEQ ID NO: 7583 - DNA, 41 bp, Homo sapiens; identical to SEQ ID NO: 1326

SEQ ID NO: 7584 - DNA, 41 bp, Homo sapiens; identical to SEQ ID NO: 1327

SEQ ID NO: 7585 - DNA, 41 bp, Homo sapiens; identical to SEQ ID NO: 1328

SEQ ID NO: 7586 - DNA, 41 bp, Homo sapiens; identical to SEQ ID NO: 1329

SEQ ID NO: 7587 - DNA, 41 bp, Homo sapiens; identical to SEQ ID NO: 1330

SEQ ID NO: 7588 - DNA, 41 bp, Homo sapiens; identical to SEQ ID NO: 553

SEQ ID NO: 7589 - DNA, 41 bp, Homo sapiens; identical to SEQ ID NO: 554

SEQ ID NO: 7590 - DNA, 41 bp, Homo sapiens; identical to SEQ ID NO: 555

SEQ ID NO: 7591 - DNA, 41 bp, Homo sapiens; identical to SEQ ID NO: 556

SEQ ID NO: 7592 - DNA, 41 bp, Homo sapiens; identical to SEQ ID NO: 557

SEQ ID NO: 7593 - DNA, 41 bp, Homo sapiens; identical to SEQ ID NO: 558

SEQ ID NO: 7594 - DNA, 41 bp, Homo sapiens; identical to SEQ ID NO: 559

SEQ ID NO: 7595 - DNA, 41 bp, Homo sapiens; identical to SEQ ID NO: 560

SEQ ID NO: 7596 - DNA, 41 bp, Homo sapiens; identical to SEQ ID NO: 561

SEQ ID NO: 7597 - DNA, 41 bp, Homo sapiens; identical to SEQ ID NO: 562

SEQ ID NO: 7598 - DNA, 41 bp, Homo sapiens; identical to SEQ ID NO: 563

SEQ ID NO: 7599 - DNA, 41 bp, Homo sapiens; identical to SEQ ID NO: 564

SEQ ID NO: 7600 - DNA, 41 bp, Homo sapiens; identical to SEQ ID NO: 565

SEQ ID NO: 7601 - DNA, 41 bp, Homo sapiens; identical to SEQ ID NO: 566

SEQ ID NO: 7602 - DNA, 41 bp, Homo sapiens; identical to SEQ ID NO: 567

SEQ ID NO: 7603 - DNA, 41 bp, Homo sapiens; identical to SEQ ID NO: 568

SEQ ID NO: 7604 - DNA, 41 bp, Homo sapiens; identical to SEQ ID NO: 569

SEQ ID NO: 7605 - DNA, 41 bp, Homo sapiens; identical to SEQ ID NO: 570

SEQ ID NO: 7606 - DNA, 41 bp, Homo sapiens; identical to SEQ ID NO: 571

SEQ ID NO: 7607 - DNA, 41 bp, Homo sapiens; identical to SEQ ID NO: 572

SEQ ID NO: 7608 - DNA, 41 bp, Homo sapiens; identical to SEQ ID NO: 573

SEQ ID NO: 7609 - DNA, 41 bp, Homo sapiens; identical to SEQ ID NO: 574

SEQ ID NO: 7610 - DNA, 41 bp, Homo sapiens; identical to SEQ ID NO: 575

SEQ ID NO: 7611 - DNA, 41 bp, Homo sapiens; identical to SEQ ID NO: 576

SEQ ID NO: 7612 - DNA, 41 bp, Homo sapiens; identical to SEQ ID NO: 577

SEQ ID NO: 7613 - DNA, 41 bp, Homo sapiens; identical to SEQ ID NO: 578

SEQ ID NO: 7614 - DNA, 41 bp, Homo sapiens; identical to SEQ ID NO: 579

SEQ ID NO: 7615 - DNA, 41 bp, Homo sapiens; identical to SEQ ID NO: 580
  misc_feature (21)..(21): a is present or absent.

SEQ ID NO: 7616 - DNA, 41 bp, Homo sapiens; identical to SEQ ID NO: 581

SEQ ID NO: 7617 - DNA, 41 bp, Homo sapiens; identical to SEQ ID NO: 582

SEQ ID NO: 7618 - DNA, 41 bp, Homo sapiens; identical to SEQ ID NO: 583

SEQ ID NO: 7619 - DNA, 41 bp, Homo sapiens; identical to SEQ ID NO: 584

SEQ ID NO: 7620 - DNA, 41 bp, Homo sapiens; identical to SEQ ID NO: 585

SEQ ID NO: 7621 - DNA, 41 bp, Homo sapiens; identical to SEQ ID NO: 586

SEQ ID NO: 7622 - DNA, 41 bp, Homo sapiens; identical to SEQ ID NO: 587

SEQ ID NO: 7623 - DNA, 41 bp, Homo sapiens; identical to SEQ ID NO: 588

SEQ ID NO: 7624 - DNA, 41 bp, Homo sapiens; identical to SEQ ID NO: 589

SEQ ID NO: 7625 - DNA, 41 bp, Homo sapiens; identical to SEQ ID NO: 590

SEQ ID NO: 7626 - DNA, 41 bp, Homo sapiens; identical to SEQ ID NO: 1261

SEQ ID NO: 7627 - DNA, 41 bp, Homo sapiens; identical to SEQ ID NO: 1262

SEQ ID NO: 7628 - DNA, 41 bp, Homo sapiens; identical to SEQ ID NO: 1263

SEQ ID NO: 7629 - DNA, 41 bp, Homo sapiens; identical to SEQ ID NO: 1264

SEQ ID NO: 7630 - DNA, 41 bp, Homo sapiens; identical to SEQ ID NO: 1265

SEQ ID NO: 7631 - DNA, 41 bp, Homo sapiens; identical to SEQ ID NO: 1266

SEQ ID NO: 7632 - DNA, 41 bp, Homo sapiens; identical to SEQ ID NO: 1267

SEQ ID NO: 7633 - DNA, 41 bp, Homo sapiens; identical to SEQ ID NO: 1

SEQ ID NO: 7634 - DNA, 41 bp, Homo sapiens; identical to SEQ ID NO: 2

SEQ ID NO: 7635 - DNA, 41 bp, Homo sapiens; identical to SEQ ID NO: 3

SEQ ID NO: 7636 - DNA, 41 bp, Homo sapiens; identical to SEQ ID NO: 4

SEQ ID NO: 7637 - DNA, 41 bp, Homo sapiens; identical to SEQ ID NO: 5

SEQ ID NO: 7638 - DNA, 41 bp, Homo sapiens; identical to SEQ ID NO: 6

SEQ ID NO: 7639 - DNA, 41 bp, Homo sapiens; identical to SEQ ID NO: 7

SEQ ID NO: 7640 - DNA, 41 bp, Homo sapiens; identical to SEQ ID NO: 8

SEQ ID NO: 7641 - DNA, 41 bp, Homo sapiens; identical to SEQ ID NO: 9

SEQ ID NO: 7642 - DNA, 41 bp, Homo sapiens; identical to SEQ ID NO: 10

SEQ ID NO: 7643 - DNA, 41 bp, Homo sapiens; identical to SEQ ID NO: 11

SEQ ID NO: 7644 - DNA, 41 bp, Homo sapiens; identical to SEQ ID NO: 12

SEQ ID NO: 7645 - DNA, 41 bp, Homo sapiens; identical to SEQ ID NO: 13

SEQ ID NO: 7646 - DNA, 41 bp, Homo sapiens; identical to SEQ ID NO: 1421

SEQ ID NO: 7647 - DNA, 41 bp, Homo sapiens; identical to SEQ ID NO: 1422

SEQ ID NO: 7648 - DNA, 41 bp, Homo sapiens; identical to SEQ ID NO: 1423

SEQ ID NO: 7649 - DNA, 43 bp, Homo sapiens; identical to SEQ ID NO: 1424
  misc_feature (21)..(23): gtg is present or absent.

SEQ ID NO: 7650 - DNA, 41 bp, Homo sapiens; identical to SEQ ID NO: 1425

SEQ ID NO: 7651 - DNA, 52 bp, Homo sapiens; identical to SEQ ID NO: 5189
  misc_feature (21)..(21): n is g or t.
  misc_feature (22)..(22): n is g.
  misc_feature (23)..(23): n is g or absent.
  misc_feature (24)..(24): n is t or absent.
  misc_feature (25)..(28): n is g or absent.
  misc_feature (29)..(29): n is t or absent.
  misc_feature (30)..(31): n is g or absent.
  misc_feature (32)..(32): n is a or absent.

SEQ ID NO: 7652 - DNA, 41 bp, Homo sapiens; identical to SEQ ID NO: 195

SEQ ID NO: 7653 - DNA, 41 bp, Homo sapiens; identical to SEQ ID NO: 713

SEQ ID NO: 7654 - DNA, 41 bp, Homo sapiens; identical to SEQ ID NO: 714

SEQ ID NO: 7655 - DNA, 41 bp, Homo sapiens; identical to SEQ ID NO: 715

SEQ ID NO: 7656 - DNA, 41 bp, Homo sapiens; identical to SEQ ID NO: 716

SEQ ID NO: 7657 - DNA, 41 bp, Homo sapiens; identical to SEQ ID NO: 717

SEQ ID NO: 7658 - DNA, 41 bp, Homo sapiens; identical to SEQ ID NO: 718

SEQ ID NO: 7659 - DNA, 41 bp, Homo sapiens; identical to SEQ ID NO: 1732

SEQ ID NO: 7660 - DNA, 41 bp, Homo sapiens; identical to SEQ ID NO: 1733

SEQ ID NO: 7661 - DNA, 41 bp, Homo sapiens; identical to SEQ ID NO: 1734

SEQ ID NO: 7662 - DNA, 41 bp, Homo sapiens; identical to SEQ ID NO: 1735

SEQ ID NO: 7663 - DNA, 41 bp, Homo sapiens; identical to SEQ ID NO: 1736

SEQ ID NO: 7664 - DNA, 41 bp, Homo sapiens; identical to SEQ ID NO: 1737

SEQ ID NO: 7665 - DNA, 41 bp, Homo sapiens; identical to SEQ ID NO: 1738

SEQ ID NO: 7666 - DNA, 41 bp, Homo sapiens; identical to SEQ ID NO: 1739

SEQ ID NO: 7667 - DNA, 42 bp, Homo sapiens; identical to SEQ ID NO: 1740
  misc_feature (21)..(22): ct is present or absent.

SEQ ID NO: 7668 - DNA, 41 bp, Homo sapiens; identical to SEQ ID NO: 1741

SEQ ID NO: 7669 - DNA, 41 bp, Homo sapiens; identical to SEQ ID NO: 2698

What is claimed is:

1. A method of identifying individuals having a polymorphism, comprising;
a. providing nucleic acid from a subject; and
b. detecting the presence of at least one polymorphism in said nucleic acid, said at least one polymorphism selected from the group consisting of polymorphisms found in SEQ ID Nos:1-3360 and 3361-7669.

2. The method of claim 1, further comprising step c) providing a prognosis to said subject based on the presence or absence of said at least one polymorphism.

3. The method of claim 2, wherein said prognosis comprises a genotype relative risk.

4. The method of claim 2, wherein said prognosis comprises a population attributable risk.

5. The method of claim 1, wherein said detecting step comprises use of a hybridization assay.

6. The method of claim 1, wherein said detecting step comprises use of a TAQMAN assay.

7. The method of claim 1, wherein said detecting step comprises use of an invasive cleavage assay.

8. The method of claim 1, wherein said detecting step comprises use of mass spectroscopy.

9. The method of claim 1, wherein said detecting step comprises use of a microarray.

10. The method of claim 1, wherein said detecting step comprises use of a polymerase chain reaction.

11. The method of claim 1, wherein said detecting step comprises use of a rolling circle extension assay.

12. The method of claim 1, wherein said detecting step comprises use of a sequencing assay.

13. The method of claim 1, wherein said detecting step comprises use of a hybridization assay employing a probe complementary to a polymorphism.

14. The method of claim 1, wherein said detecting step comprises use of a bead array assay.

15. The method of claim 1, wherein said detecting step comprises use of a primer extension assay.

16. The method of claim 1, wherein said detecting step comprises use of an enzyme mismatch cleavage assay.

17. The method of claim 1, wherein said detecting step comprises use of a branched hybridization assay.

18. The method of claim 1, wherein said detecting step comprises use of a NASBA assay.

19. The method of claim 1, wherein said detecting step comprises use of a molecular beacon assay.

20. The method of claim 1, wherein said detecting step comprises use of a cycling probe assay.

21. The method of claim 1, wherein said detecting step comprises use of a ligase chain reaction assay.

22. The method of claim 1, wherein said detection step comprises use of a sandwich hybridization assay.

23. A composition comprising a nucleic acid, said nucleic acid comprising a sequence selected from the group consisting of SEQ ID NO: 1-3360 and 3361-7669 or complements thereof.

24. The composition of claim 23, wherein said nucleic acid is 200 or less nucleotides in length.

25. The composition of claim 23, wherein said nucleic acid molecule comprises a label.

26. The composition of claim 23, wherein said nucleic acid comprises a gene sequence.

27. The composition of claim 23, wherein said nucleic acid is attached to a solid support.

28. The vector comprising the nucleic acid of claim 23.

29. A host cell comprising the vector of claim 28.

30. A polypeptide encoded by the nucleic acid of claim 23.

31. A kit for detecting a polymorphism, comprising at least one reagent that specifically detects a polymorphism in a sequence selected from the group consisting of SEQ ID Nos:3360 and 3361-7669.

32. The kit of claim 31, further comprising instructions for determining whether the subject is at increased risk of having a drug metabolism disorder.

33. The kit of claim 31, wherein said at least one reagent comprises a nucleic acid probe.

34. The kit of claim 31, wherein said kit comprises an in vitro diagnostic detection assay.

35. The kit of claim 31, wherein said kit comprises an analyte specific reagent detection assay.

36. The kit of claim 31, wherein said kit comprises a research-use-only detection assay.

37. A method for screening subjects for genetic markers associated with drug metabolizing enzyme(s), comprising:
a) providing a biological sample comprising a nucleic acid from a subject;
b) testing said nucleic acid for a polymorphism in a genetic marker associated with a drug metabolizing enzyme, said genetic marker comprising one or more nucleotide polymorphisms designated by n, said n selected from a base substitution, an insertion, or a deletion found in a sequence selected from the group consisting of SEQ ID Nos:1-3360 and 3361-7669.

38. The method of claim 37, wherein said biological sample is selected from the group consisting of blood, saliva, amniotic fluid, and tissue.

39. The method of claim 37, wherein said subject is a human.

40. The method of claim 37, wherein said nucleic acid comprises DNA.

41. The method of claim 37, wherein said nucleic acid comprises RNA.

42. A composition comprising an array of detection assays, said array comprising a plurality of drug metabolizing enzyme nucleotide polymorphism detection assays, one or more of said detection assays being capable of detecting one or more nucleotide polymorphisms designated by n in SEQ ID Nos:1-3360 and 3361-7669, wherein n represents a base substitution, insertion, or deletion compared to a wild-type sequence.

43. The composition of claim 42, wherein said detection assay is selected from the group consisting of a sequencing assay, a polymerase chain reaction assay, a hybridization assay, a hybridization assay employing a probe complementary to a polymorphism, a microarray assay, a bead array assay, a primer extension assay, an enzyme mismatch cleavage assay, a branched hybridization assay, a rolling circle replication assay, a NASBA assay, a molecular beacon assay, a cycling probe assay, a ligase chain reaction assay, and a sandwich hybridization assay.

44. A composition comprising a detection probe for determining the presense or absence a single nucleotide polymorphism in a gene encoding a drug metabolizing enzyme, said gene comprising a sequence selected from the group consisting of SEQ ID Nos:1-3360 and 3361-7669.

45. A kit comprising the detection probe of claim 44, and at least one PCR primer for amplifying at least a portion of said gene.

46. A method of determining the effectiveness of or side-effect of a drug or treatment protocol, comprising;
a. administering a drug or treatment protocol to one or more subjects;
b. obtaining nucleic acid from said one or more subjects;
c. using a detection assay to detect the presence of at least one polymorphism in said nucleic acid from said one or more of subjects, said at least one polymorphism selected from the group consisting of polymorphisms found in SEQ ID Nos:1-3360 and 3361-7669; and,
d. assigning an effectiveness rating, side-effect rating, or score for said drug or treatment protocol based upon a result of one or more said detection assays.

47. The method of claim 46, wherein said detection assay comprises a hybridization assay.

48. The method of claim 46, wherein said detection assay comprises a TAQMAN assay.

49. The method of claim 46, wherein said detection assay comprises an invasive cleavage assay.

50. The method of claim 46, wherein said detection assay comprises mass spectroscopy.

51. The method of claim 46, wherein said detection assay comprises a micro array.

52. The method of claim 46, wherein said detection assay comprises a polymerase chain reaction.

53. The method of claim 46, wherein said detection assay comprises a rolling circle extension assay.

54. The method of claim 46, wherein said detection assay comprises a sequencing assay.

55. The method of claim 46, wherein said detection assay comprises a hybridization assay employing a probe complementary to a polymorphism.

56. The method of claim 46, wherein said detection assay comprises a bead array assay.

57. The method of claim 46, wherein said detection assay comprises a primer extension assay.

58. The method of claim 46, wherein said detection assay comprises an enzyme mismatch cleavage assay.

59. The method of claim 46, wherein said detection assay comprises a branched hybridization assay.

60. The method of claim 46, wherein said detection assay comprises a NASBA assay.

61. The method of claim 46, wherein said detection assay comprises a molecular beacon assay.

62. The method of claim 46, wherein said detection assay comprises a cycling probe assay.

63. The method of claim 46, wherein said detection assay comprises a ligase chain reaction assay.

64. The method of claim 46, wherein said detection step comprises a sandwich hybridization assay.

65. The method of claim 46, in which said detection assay comprises a kit for detecting a polymorphism, said kit comprising at least one reagent that specifically detects a polymorphism in a sequence selected from the group consisting of SEQ ID Nos:1-3360 and 3361-7669.

66. The method of claim 65, further comprising instructions for determining whether the subject is at increased risk of having a drug metabolism disorder.

67. The method of claim 65, wherein said at least one reagent comprises a nucleic acid probe.

68. The method of claim 65, wherein said kit comprises an analyte specific reagent detection assay.

69. The method of claim 65, wherein said kit comprises a research-use-only detection assay.

70. The method of claim 46, wherein said nucleic acid is obtained from a biological sample, said sample being selected from the group consisting of blood, saliva, amniotic fluid, and tissue.

71. The method of claim 70, wherein said subject is a mammal.

72. The method of claim 70, wherein said nucleic acid comprises DNA.

73. The method of claim 70, wherein said nucleic acid comprises RNA.

74. The method of claim 65, wherein said kit comprises PCR primers.

75. The method of claim 74, in which said kit comprises an array of detection assays, said array comprising a plurality of drug metabolizing enzyme nucleotide polymorphism detection assays, one or more of said detection assays being capable of detecting one or more nucleotide polymorphisms designated by n in SEQ ID Nos:1-3360 and 3361-7669, wherein n represents a base substitution, insertion, or deletion compared to a wild-type sequence.

76. A method of prescribing a drug to or treatment protocol for a subject, comprising;
a. providing nucleic acid from said subject;
b. using a detection assay to detect the presence of at least one polymorphism in said nucleic acid, said at least one polymorphism selected from the group consisting of polymorphisms found in SEQ ID Nos:1-3360 and 3361-7669; and,
c. prescribing said drug or treatment protocol based upon the result of said detection assay.

77. The method of claim 76, further comprising step d) providing a prognosis to said subject based on the presence or absence of said at least one polymorphism.

78. The method of claim 77, wherein said prognosis comprises a genotype relative risk.

79. The method of claim 77, wherein said prognosis comprises a population attributable risk.

80. The method of claim 76, wherein said detection assay comprises a hybridization assay.

81. The method of claim 76, wherein said detection assay comprises a TAQMAN assay.

82. The method of claim 76, wherein said detection assay comprises an invasive cleavage assay.

83. The method of claim 76, wherein said detection assay comprises mass spectroscopy.

84. The method of claim 76, wherein said detection assay comprises a microarray.

85. The method of claim 76, wherein said detection assay comprises a polymerase chain reaction.

86. The method of claim 76, wherein said detection assay comprises a rolling circle extension assay.

87. The method of claim 76, wherein said detection assay comprises a sequencing assay.

88. The method of claim 76, wherein said detection assay comprises a hybridization assay employing a probe complementary to a polymorphism.

89. The method of claim 76, wherein said detection assay comprises a bead array assay.

90. The method of claim 76, wherein said detection assay comprises a primer extension assay.

91. The method of claim 76, wherein said detection assay comprises an enzyme mismatch cleavage assay.

92. The method of claim 76, wherein said detection assay comprises a branched hybridization assay.

93. The method of claim 76, wherein said detection assay comprises a NASBA assay.

94. The method of claim 76, wherein said detection assay comprises a molecular beacon assay.

95. The method of claim 76, wherein said detection assay comprises a cycling probe assay.

96. The method of claim 76, wherein said detection assay comprises a ligase chain reaction assay.

97. The method of claim 76, wherein said detection step comprises a sandwich hybridization assay.

98. The method of claim 76, in which said detection assay comprises a kit for detecting a polymorphism, said kit comprising at least one reagent that specifically detects a polymorphism in a sequence selected from the group consisting of SEQ ID Nos:1-3360 and 3361-7669.

99. The method of claim 98, further comprising instructions for determining whether the subject is at increased risk of having a drug metabolism disorder.

100. The method of claim 99, wherein said at least one reagent comprises a nucleic acid probe.

101. The method of claim 98, wherein said kit comprises an in vitro diagnostic detection assay.

102. The method of claim 98, wherein said kit comprises an analyte specific reagent detection assay.

103. The method of claim 98, wherein said kit comprises a research-use-only detection assay.

104. The method of claim 76, wherein said nucleic acid is obtained from a biological sample, said sample being selected from the group consisting of blood, saliva, amniotic fluid, and tissue.

105. The method of claim 104, wherein said subject is a human.

106. The method of claim 104, wherein said nucleic acid comprises DNA.

107. The method of claim 104, wherein said nucleic acid comprises RNA.

108. The method of claim 104, wherein said kit comprises PCR primers.

109. The method of claim 98, in which said kit comprises an array of detection assays, said array comprising a plurality of drug metabolizing enzyme nucleotide polymorphism detection assays, one or more of said detection assays being capable of detecting one or more nucleotide polymorphisms designated by n in SEQ ID Nos: 1-3360 and 3361-7669, wherein n represents a base substitution, insertion, or deletion compared to a wild-type sequence.

110. The method of claim 109, wherein said detection assay is selected from the group consisting of a sequencing assay, a polymerase chain reaction assay, a hybridization assay, a hybridization assay employing a probe complementary to a polymorphism, a microarray assay, a bead array assay, a primer extension assay, an enzyme mismatch cleavage assay, a branched hybridization assay, a rolling circle replication assay, a NASBA assay, a molecular beacon assay, a cycling probe assay, a ligase chain reaction assay, and a sandwich hybridization assay.

111. A method for generating assay data comprising:
a. obtaining a sample from a subject containing nucleic acid;
b. transferring said sample to a laboratory; and
c. receiving data from said laboratory, wherein said data corresponds to the presence of at least one polymorphism in said nucleic acid, said at least one polymorphism selected from the group consisting of polymorphisms found in SEQ ID Nos:1-3360 and 3361-7669.

112. A data set generated by the method of claim 111.

113. A composition comprising a nucleic acid, said nucleic acid comprising a gene sequence, said gene sequence having at least one polymorphism, said at least one polymorphism selected from the group consisting of polymorphisms found in SEQ ID NOs:1-3360 and 3361-7669.

114. The composition of claim 113, wherein said at least one polymorphism is located in a non-coding portion of said gene.

115. The composition of claim 113, wherein said at least one polymorphism is located in an intron.

116. The composition of claim 113, wherein said at least one polymorphism is located in an exon.

117. The composition of claim 113, wherein said at least one polymorphism is located in a 5′ untranslated portion of said gene.

118. The composition of claim 113, wherein said at least one polymorphism is located in a 3′ untranslated portion of said gene.

119. The composition of claim 113, wherein said at least one polymorphism is located in an untranslated regulatory portion of said gene.

120. The composition of claim 113, wherein said at least one polymorphism is located in a region of said gene affecting splicing.

121. The composition of claim 113, wherein said at least one polymorphism is located in a region of said gene affecting level of transcription of said gene.

122. The composition of claim 113, wherein two or more of said polymorphisms are located in a gene sequence, said gene sequence comprising an intron, an exon, a 5′ untranslated portion of said gene, a 3′ untranslated portion of said gene, a regulatory portion of said gene, a portion of said gene affecting splicing, and a portion of said gene affecting level or transcription of said gene.

123. A composition comprising an oligonucleotide, said oligonucleotide comprising at least one polymorphism, said at least one polymorphism selected from the group consisting of polymorphisms found in SEQ ID Nos:1-3360 and 3361-7669, and said oligonucleotide comprising at least five bases upstream or five bases downstream of said polymorphism.
